(19) United States
(12) Patent Application Publication
(10) Pub. No.: US 2021/0371533 A1
(43) Pub. Date: Dec. 2, 2021

(54) METHODS OF TREATING INFLAMMATORY DISEASES BY BLOCKING GALECTIN-3

(71) Applicant: TrueBinding, Inc., Foster City, CA (US)

(72) Inventors: Dongxu Sun, Los Altos, CA (US); Catherine A. Gordon, Fremont, CA (US); Ksenya Shchors, San Mateo, CA (US); Yan Wang, Concord, CA (US); Tsung-Huang Tsai, San Carlos, CA (US); Yew Ann Leong, San Francisco, CA (US)

(21) Appl. No.: 17/303,268

(22) Filed: May 25, 2021

Related U.S. Application Data
(60) Provisional application No. 63/030,069, filed on May 26, 2020.

(51) Int. Cl. C07K 16/28; A61P 31/14; A61P 37/06; A61P 19/04

(52) U.S. Cl. CPC C07K 16/2851; A61P 31/14; C07K 2317/56; A61P 19/04; C07K 2317/565; A61P 37/06

(57) ABSTRACT

Disclosed herein are methods, antibodies, and compositions for disrupting an interaction between Galectin-3 (Gal3) and viral proteins, such as proteins of the SARS-CoV-2 virus or other coronaviruses, or viral-associated host proteins. Further disclosed herein are methods, medicaments, and compositions for the treatment of a disease or a disorder in a subject, such as the treatment of a viral infection, or treatment of a fibrosis, such as lung fibrosis, that develop as a sequela of a viral infection, or cytokine release syndrome. Further disclosed herein are methods, medicaments, and compositions for the treatment of an inflammatory disease or disorder, such as inflammation of the lungs or systemic lupus erythematosus, which may be associated with neutrophil activity, in a subject. Also disclosed herein are pharmaceutical antibody formulations for the treatment of a disease, such as a coronavirus infection.

### CROSS-REFERENCE TO RELATED APPLICATIONS

[0001] This application claims the benefit of priority of U.S. Provisional Patent Application No. 63/030,069, filed May 26, 2020, which is hereby expressly incorporated by reference in its entirety.

### REFERENCE TO SEQUENCE LISTING

[0002] The present application is being filed along with a Sequence Listing in electronic format. The Sequence Listing is provided as a file entitled SeqListingIMMUT020A.TXT, which was created and last modified on May 25, 2021, which is 783,883 bytes in size. The information in the electronic Sequence Listing is hereby incorporated by reference in its entirety.

### FIELD OF THE INVENTION

[0003] Aspects of the present disclosure relate generally to antibodies or binding fragments thereof that bind Galectin-3 (Gal3). Some aspects bind Gal-3 and block its interaction with viral proteins, such as proteins of the SARS-CoV-2 virus or other coronaviruses, or viral-associated host proteins. Aspects of the present disclosure relate generally to antibodies or binding fragments thereof that reduce inflammation, for example, by reducing activation of immune cells by Gal3.

### BACKGROUND

[0004] Galectin-3 (Gal3, GAL3) is a lectin, or a carbohydrate-binding protein, with specificity towards beta-galactosides. In human cells, Gal3 is expressed and can be found in the nucleus, cytoplasm, cell surface, and in the extracellular space.

### SUMMARY

[0005] Galectin-3 (Gal3) has been implicated to have immunomodulatory activity. An example of this is the interaction between Gal3 and T-cell immunoglobulin and mucin-domain containing-3 (TIM-3), which causes suppression of immune responses such as T cell activation and may enable cancer cells to evade immune clearance. This phenomenon and methods to inhibit the same are exemplified in WO 2019/023247 and WO 2020/160156, each of which is hereby expressly incorporated by reference in its entirety.

[0006] The COVID-19 pandemic caused by the SARS-CoV-2 coronavirus has resulted in immense impact on human mortality, the global economy, and burden on the public health infrastructure around the world. Much of how the virus interacts with the host immune system is still currently unknown. However, uncontrolled inflammation in response to a SARS-CoV-2 coronavirus can contribute greatly to increased risk of long-term sequelae and death. In addition, coronavirus immunotherapies or vaccines for humans are only beginning to be approved. Therefore, there is a lasting need for new and effective treatments and prophylaxes against SARS-CoV-2 and other coronaviruses, as well as against inflammatory diseases in general.

[0007] Disclosed herein are methods, antibodies, and compositions for disrupting an interaction between Galectin-3 (Gal3) and viral proteins, such as proteins of the SARS-CoV-2 virus or other coronaviruses, such as the coronavirus spike protein, or viral-associated host proteins, including ACE2 or CD147.

[0008] Also disclosed herein are methods of treating a viral infection. This viral infection may be associated with inflammatory symptoms. In some embodiments, the methods are directed to preventing and/or reducing a viral spread, or reducing a risk that a virus can invade a cell (e.g. either in vitro or in vivo).

[0009] Further disclosed herein are methods, medicaments, and compositions involving an anti-Gal3 antibody or binding fragment thereof for the treatment of a disease or a disorder in a subject, such as the treatment of a viral infection, or treatment of a fibrosis, such as lung fibrosis, which may, for example, develop as a sequela of a viral infection, or an inflammatory disease, such as chronic obstructive pulmonary disease (COPD).

[0010] Also disclosed herein are the methods and uses of an anti-Gal3 antibodies or binding fragment thereof for the treatment of cytokine release syndrome (CRS, cytokine storm) or sepsis caused, for example, by a bacterial, viral, fungal, or protozoal infection. In some embodiments, the CRS may be a result of the sepsis. In some embodiments, the CRS is a result of a coronavirus infection, such as a SARS-CoV-2 infection.

[0011] Also disclosed herein are methods, medicaments, and compositions involving an anti-Gal3 antibody or binding fragment thereof for the treatment of an inflammatory disease, or for decreasing or inhibiting inflammation in a subject. In some embodiments, this inflammation may be associated with activation and/or migration of immune cells such as neutrophils. In some embodiments, administration of the anti-Gal3 antibody or binding fragment thereof decreases or inhibits neutrophil activation and/or migration in the subject. In some embodiments, administration of the anti-Gal3 antibody or binding fragment thereof decreases or inhibits cleavage of CD62L expressed by neutrophils and/or decreases or inhibits IL-8 production in the subject. In some embodiments, administration of the anti-Gal3 antibody or binding fragment thereof decreases the number of neutrophils in the subject. In some embodiments, administration of the anti-Gal3 antibody or binding fragment thereof modulates expression of Gal3, myeloperoxidase (MPO), growth-related oncogene α (GROα)/keratinocytes-derived chemokine (KC), Ly6c1, INOS, IL-6, TNFα, IL-1B, Col1A1, aSMA, TGFβ, VEGFA, VEGFB, or any combination thereof, in the subject. In some embodiments, administration of the anti-Gal3 antibody or binding fragment thereof decreases production of autoantibodies, such as anti-nucleic acid autoantibodies, in the subject. The inflammation may be lung inflammation and associated with diseases including but not limited to COPD, pneumonitis, asthma, sarcoidosis, pulmonary fibrosis, histiocytosis, bronchiolitis obliterans, or any combination thereof. In some embodiments, the inflammation may be associated with an autoimmune disease, including but not limited to systemic lupus erythematosus (SLE), Graves' disease, rheumatoid arthritis, multiple sclerosis, Sjogren's syndrome, celiac disease, or any combination thereof.

[0012] Also disclosed herein are methods of decreasing or inhibiting cleavage of CD62L, decreasing IL-8 production, and/or modulating expression of Gal3, MPO, GROα/KC, Ly6c1, INOS, IL-6, TNFα, IL-1B, Col1A1, aSMA, TGFβ, VEGFA, VEGFB, or any combination thereof, by a cell. In some embodiments, the methods comprise contacting the cell with an anti-Gal3 antibody or binding fragment thereof.

[0013] Also disclosed herein are pharmaceutical antibody formulations. In some embodiments, the pharmaceutical antibody formulations comprise a therapeutically effective amount of any one or more of the antibodies disclosed herein. In some embodiments, the pharmaceutical antibody formulations further comprise histidine, methionine, NaCl, and polysorbate. In some embodiments, the pharmaceutical antibody formulation is at a pH between 5.3 and 6.3.

[0014] Also disclosed herein are sterile vials comprising any one of the pharmaceutical antibody formulations disclosed herein. In some embodiments, the sterile vials comprise a concentrated form of any one of the pharmaceutical antibody formulations disclosed herein, such that the concentrated form is intended to be diluted prior to administration of the pharmaceutical antibody formulation.

[0015] The pharmaceutical antibody formulations and sterile vial embodiments disclosed herein may be used in a method of treatment in a subject in need thereof. In some embodiments, the pharmaceutical antibody formulations and sterile vial embodiments disclosed herein are used in a method of treating a coronavirus infection in a subject in need thereof. In some embodiments, the coronavirus infection is a SARS-related coronavirus infection. In some embodiments, the coronavirus infection is a SARS-CoV-2 infection. In some embodiments, the pharmaceutical antibody formulations and sterile vial embodiments disclosed herein are used in a method of decreasing or inhibiting inflammation in a subject in need thereof. In some embodiments, the inflammation may be associated with an inflammatory disease, including but not limited to lung inflammation, such as COPD, pneumonitis, asthma, sarcoidosis, pulmonary fibrosis, histiocytosis, bronchiolitis obliterans, or any combination thereof, or an autoimmune disease, such as systemic lupus erythematosus (SLE), Graves' disease, rheumatoid arthritis, multiple sclerosis, Sjogren's syndrome, celiac disease, or any combination thereof.

### BRIEF DESCRIPTION OF THE DRAWINGS

[0016] In addition to the features described above, additional features and variations will be readily apparent from the following descriptions of the drawings and exemplary embodiments. It is to be understood that these drawings depict typical embodiments and are not intended to be limiting in scope.

[0017] FIG. 1 depicts a graphical representation of relative Gal3 mRNA expression in normal individuals and COVID-19 patients.

[0018] FIG. 2 depicts a graphical representation of the assessment of relative binding affinity of hACE2 protein to Gal3 obtained from different vendors as measured by ELISA.

[0019] FIG. 3 depicts a graphical representation of the assessment of relative binding affinity of hCD147 protein to Gal3 obtained from different vendors as measured by ELISA.

[0020] FIG. 4 depicts a graphical representation of the assessment of relative binding affinity of spike (S) protein of SARS-CoV-2 protein to Gal3 as measured by ELISA.

[0021] FIG. 5A depicts a graphical representation of the assessment of relative binding affinity of hACE2 to Gal3 following blockade by anti-Gal3 antibodies as measured by ELISA.

[0022] FIG. 5B depicts a graphical representation of the assessment of relative binding affinity of spike (S) protein of SARS-CoV-2 protein to Gal3 following blockade by anti-Gal3 antibodies as measured by ELISA.

[0023] FIG. 6 depicts various embodiments of sequences of human Gal3 (isoform 1 and 3), ACE2, CD147, and SARS-CoV-2 S protein.

[0024] FIG. 7 depicts Gal3 peptides used for generating anti-Gal3 antibodies and binning.

[0025] FIG. 8 depicts variable heavy chain CDR1 sequences of exemplary anti-Gal3 antibodies. In some embodiments, any of the method or compositions provided herein can include one or more of the CDRs provided herein.

[0026] FIG. 9 depicts variable heavy chain CDR2 sequences of exemplary anti-Gal3 antibodies. In some embodiments, any of the method or compositions provided herein can include one or more of the CDRs provided herein.

[0027] FIG. 10 depicts variable heavy chain CDR3 sequences of exemplary anti-Gal3 antibodies. In some embodiments, any of the method or compositions provided herein can include one or more of the CDRs provided herein.

[0028] FIG. 11 depicts variable light chain CDR1 sequences of exemplary anti-Gal3 antibodies. In some embodiments, any of the method or compositions provided herein can include one or more of the CDRs provided herein.

[0029] FIG. 12 depicts variable light chain CDR2 sequences of exemplary anti-Gal3 antibodies. In some embodiments, any of the method or compositions provided herein can include one or more of the CDRs provided herein.

[0030] FIG. 13 depicts variable light chain CDR3 sequences of exemplary anti-Gal3 antibodies. In some embodiments, any of the method or compositions provided herein can include one or more of the CDRs provided herein.

[0031] FIG. 14 depicts heavy and light chain CDR combinations of various exemplary anti-Gal3 antibodies. In some embodiments, any of the method or compositions provided herein can include one or more of the heavy and light chain CDR combinations provided herein.

[0032] FIG. 15 depicts heavy chain variable region sequences of exemplary anti-Gal3 antibodies. In some embodiments, any of the methods or compositions provided herein can include any one of these VH regions.

[0033] FIG. 16 depicts light chain variable region sequences of exemplary anti-Gal3 antibodies. In some embodiments, any of the methods or compositions provided herein can include any one of these VL regions.

[0034] FIG. 17 depicts heavy chain variable region and light chain variable region sequences of exemplary anti-Gal3 antibodies. In some embodiments, any one or more of the VH/VL and/or CDRs provided in the other figures can be paired with any one or more of the relevant sequences provided herein.

[0035] FIG. 18 depicts heavy chain and light chain sequences of exemplary anti-Gal3 antibodies. In some embodiments, any one or more of the VH/VL and/or CDRs provided in the other figures can be paired with any one or more of the relevant sequences provided herein.

[0036] FIG. 19 depicts an alignment of hinge and constant heavy chain domain 2 (C_{H}2) domain amino acid sequences of wild-type human immunoglobulin G1 (IgG1), IgG2 and IgG4 as well as their sigma variants. The alignment above uses EU numbering. Residues identical to wild-type IgG1 are indicated as dots; gaps are indicated with hyphens. Sequence is given explicitly if it differs from wild-type IgG1 or from the parental subtype for σ variants. Open boxes beneath the alignment correspond to International Immunogenetics Information System (IMGT) strand definitions. Boxes beneath the alignment correspond to the strand and helix secondary structure assignment for wild-type IgG1. Residues 267-273 form the BC loop and 322-332 form the FG loop. Also provided are exemplary constant regions for human IgG4 heavy (S228P mutant) and light (kappa) chains (SEQ ID NOs: 832-833) and murine IgG2A (LALAPG and LALA mutants) (SEQ ID NOs: 838-839). In some embodiments, any one or more of the VH/VL and/or CDRs provided in the other figures or otherwise disclosed herein can be paired with any one or more of the exemplary constant regions provided herein.

[0037] FIG. 20 depicts antibody affinities (K_{D}) of anti-Gal3 humanized antibodies IMT001 and IMT006a for human, cynomolgus, and mouse Gal3.

[0038] FIG. 21 depicts a graphical representation of body temperature of LPS-treated mice when further treated with either PBS control or the anti-Gal3 antibody IMT001. Mice treated with IMT001 experienced amelioration of LPS-induced hypothermia.

[0039] FIG. 22A-B depict the impact of Gal3 constructs (full length wild-type, truncated, and P64H mutant Gal3) on neutrophil shedding of CD62L (FIG. 22A) and secretion of IL-8 (FIG. 22B).

[0040] FIG. 23A-B depict the effects of the exemplary anti-Gal3 antibody TB001 on reversing Gal3-induced shedding of CD62L (FIG. 23A) and IL-8 secretion (FIG. 23B) by activated neutrophils.

[0041] FIG. 24A-D depict the reduction of inflammation in a mouse model of inflammatory lung disease by anti-Gal3 antibodies. FIG. 24A depicts elevated expression of Gal3 in bronchoalveolar fluid samples of a chronic obstructive pulmonary disease (COPD) mouse model. FIG. 24B depicts elevated transcript levels of Gal3 and genes associated with neutrophil number and function (Ly6c1, Kc, Inos), inflammatory cytokines (Il6, Tnfa, Il1b), and fibrosis (Col1A1, aSma, Tgfb, Vegfa, Vegfb) in lung tissue from a COPD mouse model compared to healthy tissue. Treatment with the exemplary anti-Gal3 antibodies 2D10.2B2 and mTB001 resulted in a reduction of these transcript levels in the COPD model. FIG. 24C depicts increases in % and total neutrophil count in lung tissue of a COPD model compared to healthy tissue, and treatment with the exemplary anti-Gal3 antibodies results in a reduction in the neutrophil count. FIG. 24D depicts an increased expression of myeloperoxidase (MPO) and keratinocytes-derived chemokine (KC) in bronchoalveolar fluid samples of a COPD mouse model compared to healthy mice. Treatment with 2D10.2B2 and mTB001 reduced expression of MPO, and 2D10.2B2 also had a significant effect on reducing expression of KC in the diseased model.

[0042] FIG. 25 depicts a reduction in anti-DNA autoantibody generation by treatment of the exemplary anti-Gal3 antibody mbTB001 in a graft versus host disease mouse model.

[0043] FIG. 26 depicts reduction of TNFα production by activated neutrophils under pro-inflammatory conditions by treatment with the exemplary anti-Gal3 antibodies TB001 and TB006 compared to the control antibody MOPC21.

[0044] FIG. 27 depicts reduction of IL-6 production by activated neutrophils under pro-inflammatory conditions by treatment with the exemplary anti-Gal3 antibodies TB001 and TB006 compared to the control antibody MOPC21.

[0045] FIG. 28 depicts antibody names used throughout the present disclosure refer to the same antibody (with exemplary peptide and nucleic acid sequences provided elsewhere in the disclosure and appropriately attributed to at least one of the depicted names) and may be used interchangeably. The names shown in a column correspond to the same antibody.

[0046] FIG. 29 depicts nucleic acid sequences that encode for exemplary heavy chain variable regions of anti-Gal3 antibodies disclosed herein. In some embodiments, any of the compositions or methods provided herein can include one or more of the heavy chain variable regions encoded by the nucleic acids provided herein.

[0047] FIG. 30 depicts nucleic acid sequences that encode for exemplary light chain variable regions of anti-Gal3 antibodies disclosed herein. In some embodiments, any of the compositions or methods provided herein can include one or more of the light chain variable regions encoded by the nucleic acids provided herein.

[0048] FIG. 31 depicts nucleic acid sequences that encode for exemplary heavy chains of anti-Gal3 antibodies disclosed herein. In some embodiments, any of the compositions or methods provided herein can include one or more of the heavy chains encoded by the nucleic acids provided herein.

[0049] FIG. 32 depicts nucleic acid sequences that encode for exemplary light chains of anti-Gal3 antibodies disclosed herein. In some embodiments, any of the compositions or methods provided herein can include one or more of the light chains encoded by the nucleic acids provided herein.

[0050] FIG. 33A-B depicts an exemplary alignment for the heavy chain CDRs (FIG. 33A) and light chain CDRs (FIG. 33B) for the exemplary anti-Gal3 antibodies disclosed herein.

### DETAILED DESCRIPTION

[0051] Galectin-3 (Gal3, GAL3) is known to play an important role in cell proliferation, adhesion, differentiation, angiogenesis, and apoptosis. This activity is, at least in part, due to immunomodulatory properties and binding affinity towards other immune regulatory proteins, signaling proteins, and other cell surface markers. Gal3 functions by distinct N-terminal and C-terminal domains. The N-terminal domain (isoform 1: amino acids 1-111, isoform 3: amino acids 1-125) comprise a tandem repeat domain (TRD, isoform 1: amino acids 36-109, isoform 3: amino acids 50-123) and is largely responsible for oligomerization of Gal3. The C-terminal domain (isoform 1: amino acids 112-250, isoform 3: amino acids 126-264) comprise a carbohydrate-recognition-binding domain (CRD), which binds to β-galactosides. An exemplary sequence for isoform 1 of human Gal3 (NCBI Reference No. NP_002297.2) is shown in SEQ ID NO: 1. An exemplary sequence for isoform 3 of human Gal3 (NCBI Reference No. NP_001344607.1) is shown in SEQ ID NO: 2.

[0052] Furthermore, Gal3 plays an important role in promoting leukocyte recruitment to sites infected by a pathogen, such as a virus. Increased cytokine release by leukocytes that fight a viral infection may trigger a cytokine release syndrome (CRS, “cytokine storm”). CRS is a major cause of lethal outcome for patients infected with SARS-CoV-2 and other coronaviruses. Inhibition of Gal3 activity hinders leukocyte recruitment and reduces levels of harmful cytokine production.

[0053] In some embodiments, anti-Gal3 antibodies or binding fragments thereof or compositions comprising anti-Gal3 antibodies or binding fragments thereof are provided. In some embodiments, the anti-Gal3 antibodies or binding fragments thereof bind to the N-terminal domain, the N-terminus and/or the TRD of Gal3. In some embodiments, the anti-Gal3 antibodies or binding fragments thereof bind to the C-terminal domain, the C-terminus and/or the CRD of Gal3. In some embodiments, the anti-Gal3 antibodies or binding fragments thereof do not bind to the N-terminal domain, the N-terminus and/or the TRD of Gal3. In some embodiments, the anti-Gal3 antibodies or binding fragments thereof do not bind to the C-terminal domain, the C-terminus and/or the CRD of Gal3.

[0054] Some embodiments disclosed herein are antibodies and binding fragments thereof that are specific for Galectin-3 (Gal3), and methods of use thereof for the treatment or prevention of a viral infection, such as a SARS-CoV-2 infection, a SARS-related coronavirus infection, or other coronavirus infection. The anti-Gal3 antibodies and binding fragments thereof disclosed herein disrupt the interaction between Gal3 and the SARS-CoV-2 spike (S) protein. The anti-Gal3 antibodies and binding fragments thereof disclosed herein also disrupt the interaction between Gal3 and host cell receptors that viruses use to enter a host cell, such as ACE2 and/or CD147. Also disclosed herein are methods of using the anti-Gal3 antibodies and binding fragments thereof for the treatment of sequela of a viral infection, such as pulmonary fibrosis caused as a result of a respiratory viral infection such as a SARS-CoV-2 infection, as well as decreasing or inhibiting toxicity due to cytokine release syndrome (CRS) that may occur, for example, due to a respiratory viral infection such as a SARS-CoV-2 infection.

[0055] Provided herein are embodiments that related to anti-Gal3 antibodies or binding fragments thereof and their use in methods and uses to disrupt the interaction between Gal3 and viral proteins or host receptor proteins. In some embodiments, this disruption is used to treat an on-going viral infection. In some embodiments, the viral infection is a coronavirus infection. In some embodiments, the viral infection is a SARS-CoV-2 viral infection. In other embodiments, this disruption is used to treat a sequela of a prior viral infection.

[0056] In some embodiments, the methods involve an antibody that binds to Gal3 and disrupts an interaction between Gal3 and another protein, such as a viral protein or a host receptor protein. This can be a direct obstruction of the interaction zone between Gal3 and the other protein, or an indirect alteration, such as a binding that results in a conformational change of Gal3, so that it no longer binds or is active with the other protein. It can also result by binding to a first section of Gal3, where some other part of the antibody obstructs or alters the interaction between Gal3 and the other protein. In some embodiments, the first section of Gal3 is the N-terminal domain of Gal3, the tandem repeat domain (TRD) of Gal3, or the C-terminal domain of Gal3. In some embodiments, the antibody that binds to Gal3 does not bind to the C-terminal domain of Gal3.

[0057] In some embodiments, a method is provided of disrupting an interaction between Gal3 and a viral protein or a host receptor protein. In some embodiments, the method comprises contacting an interaction site between Gal3 and the viral protein or host receptor protein with an antibody or binding fragment thereof that selectively binds to Gal3 and disrupts the interaction between Gal3 and the viral protein or host receptor protein.

[0058] In some embodiments, methods of using the anti-Gal3 antibodies or binding fragments thereof or compositions comprising anti-Gal3 antibodies or binding fragments thereof to block or disrupt an interaction between Gal3 and another protein either in vitro or in vivo are provided. In some embodiments, the interaction is between Gal3 and a viral protein. In some embodiments, the viral protein is a coronavirus protein. In some embodiments, the viral protein is a SARS-CoV-2 protein. In some embodiments, the viral protein is a SARS-CoV-2 S, E, M, or HE protein. In some embodiments, the viral protein is a SARS-CoV-2 S protein. In some embodiments, the interaction is between Gal3 and a host receptor protein that a virus uses to enter the host cell. In some embodiments, the host receptor protein is a protein used by a coronavirus to enter the host cell. In some embodiments, the host receptor protein is a protein used by a SARS-CoV-2 virus to enter the host cell. In some embodiments, the host receptor protein is ACE2 and/or CD147. In some embodiments, the methods of using the anti-Gal3 antibodies or binding fragments thereof or compositions comprising anti-Gal3 antibodies or binding fragments thereof to block or disrupt an interaction between Gal3 and another protein is used to treat, cure, or prevent a disease or disorder in a subject. In some embodiments, the disease or disorder is a viral infection, such as a SARS-CoV-2 infection or other coronavirus infection. In some embodiments, the disease or disorder is a sequela of a prior viral (e.g. SARS-CoV-2 or other coronavirus) infection. In some embodiments, the sequela comprises fibrosis such as lung fibrosis. In some embodiments, the anti-Gal3 antibodies or binding fragments thereof are administered in conjunction with another antiviral or anti-inflammatory therapy. In some embodiments, the disease or disorder is CRS. In some embodiments, the CRS is a result of a viral infection. In some embodiments, the CRS is a result of a SARS-CoV-2 infection or other coronavirus infection. In some embodiments, the disease or disorder is sepsis. In some embodiments, the disease or disorder is viral sepsis. In some embodiments, the CRS is a result of sepsis caused by a viral infection. In some embodiments, the CRS is a result of sepsis caused by a SARS-CoV-2 infection or other coronavirus infection.

[0059] Also disclosed herein are methods of decreasing or inhibiting inflammation in a subject in need thereof. In some embodiments, the methods comprise administering to the subject an effective amount of an anti-Gal3 antibody or binding fragment thereof. The inflammation may or may not be associated with a viral infection, such as a coronavirus infection. In some embodiments, inflammation may be associated with a disease, such as an inflammatory disease or an autoimmune disease. For example, the inflammatory disease may comprise lung inflammation, COPD, pneumonitis, asthma, sarcoidosis, pulmonary fibrosis, histiocytosis, bronchiolitis obliterans, or any combination thereof, or an autoimmune disease such as systemic lupus erythematosus, Graves' disease, rheumatoid arthritis, multiple sclerosis, Sjogren's syndrome, celiac disease, or any combination thereof. The inflammation may be associated with neutrophil activation and/or migration, where administration of the anti-Gal3 antibody or binding fragment thereof reduces or inhibits neutrophil activation and/or migration.

[0060] Additional aspects of the present disclosure relate generally to pharmaceutical antibody formulations comprising antibodies that bind to Gal3 and one or more excipients, diluents, carriers, salts, buffers, and the like. These pharmaceutical antibody formulations are used to treat a disease such as an infection by a pathogen such as a virus, and/or inflammation associated with the aforementioned or herein disclosed disease(s). In some embodiments, the pharmaceutical antibody formulations comprise any one of the anti-Gal3 antibodies disclosed herein, histidine, methionine, NaCl, and polysorbate, and is at a pH of between 5.3 and 6.3. Also disclosed herein are sterile vials comprising any one of the pharmaceutical antibody formulations disclosed herein, including concentrated forms of the pharmaceutical antibody formulations intended to be diluted for administration.

[0061] Also disclosed herein are embodiments of methods of treating a coronavirus infection, comprising administering any one of the pharmaceutical antibody formulations disclosed herein to a subject in need of treatment for a coronavirus infection. In some embodiments, the subject is a mammal. In some embodiments, the subject is a human.

### Definitions

[0062] In the following detailed description, reference is made to the accompanying drawings, which form a part hereof. In the drawings, similar symbols typically identify similar components, unless context dictates otherwise. The illustrative embodiments described in the detailed description, drawings, and claims are not meant to be limiting. Other embodiments may be utilized, and other changes may be made, without departing from the spirit or scope of the subject matter presented herein. It will be readily understood that the aspects of the present disclosure, as generally described herein, and illustrated in the Figures, can be arranged, substituted, combined, separated, and designed in a wide variety of different configurations, all of which are explicitly contemplated herein.

[0063] Unless defined otherwise, technical and scientific terms used herein have the same meaning as commonly understood by one of ordinary skill in the art to which the present disclosure belongs. For purposes of the present disclosure, the following terms are defined below.

[0064] The articles “a” and “an” are used herein to refer to one or to more than one (for example, at least one) of the grammatical object of the article. By way of example, “an element” means one element or more than one element.

[0065] By “about” is meant a quantity, level, value, number, frequency, percentage, dimension, size, amount, weight or length that varies by as much as 30, 25, 20, 15, 10, 9, 8, 7, 6, 5, 4, 3, 2 or 1% to a reference quantity, level, value, number, frequency, percentage, dimension, size, amount, weight or length.

[0066] Throughout this specification, unless the context requires otherwise, the words “comprise,” “comprises,” and “comprising” will be understood to imply the inclusion of a stated step or element or group of steps or elements but not the exclusion of any other step or element or group of steps or elements. By “consisting of” is meant including, and limited to, whatever follows the phrase “consisting of.” Thus, the phrase “consisting of” indicates that the listed elements are required or mandatory, and that no other elements may be present. By “consisting essentially of” is meant including any elements listed after the phrase and limited to other elements that do not interfere with or contribute to the activity or action specified in the disclosure for the listed elements. Thus, the phrase “consisting essentially of” indicates that the listed elements are required or mandatory, but that other elements are optional and may or may not be present depending upon whether or not they materially affect the activity or action of the listed elements.

[0067] The term “coronavirus” as used herein refers to the family of enveloped, positive-sense, single stranded RNA viruses that infect mammals and birds. In humans, coronavirus infections can cause mild symptoms as a common cold, or more severe respiratory conditions such as severe acute respiratory syndrome (SARS), acute respiratory distress syndrome (ARDS), coughing, congestion, sore throat, shortness of breath, pneumonia, bronchitis, and hypoxia. Other symptoms include but are not limited to fever, fatigue, myalgia, and gastrointestinal symptoms such as vomiting, diarrhea, and abdominal pain. The viral envelope comprises spike (“S”), envelope (“E”), membrane (“M”), and hemagglutinin esterase (“HE”) transmembrane structural proteins. The S protein comprises a receptor binding domain (“RBD”), a highly immunogenic region that determines the host receptor specificity of the virus strain. The viral nucleocapsid comprises multiple nucleocapsid (“N” or “NP”) proteins coating the RNA genome. During infection, the S protein attaches to a host cell receptor and initiate entry into the host cell through endocytosis or fusion of the envelope membrane. The RNA genome is translated by the host ribosome to produce new structural proteins and RNA-dependent RNA polymerases, which replicate the viral genome. Viral particles are assembled in the host endoplasmic reticulum and are shed by Golgi-mediated exocytosis. More information about the structure and infection cycle of coronaviruses can be found in Fehr A R & Perlman S. “Coronaviruses: An Overview of Their Replication and Pathogenesis” Methods Mol. Biol. (2015); 1282:1-23, hereby expressly incorporated by reference in its entirety.

[0068] The terms “SARS-CoV-2” and “2019-nCoV” as used herein refers to the coronavirus strain responsible for the human coronavirus disease 2019 (“COVID-19”) pandemic. The contagiousness, long incubation period, and modern globalization has led to worldwide spread of the virus. Development of SARS and other respiratory issues in infected individuals has resulted in immense stress on medical infrastructure. While testing is ongoing, there are currently no approved treatments or vaccines for SARS-CoV-2 and other coronaviruses in humans. Like the original SARS virus (SARS-CoV-1), SARS-CoV-2 infects human cells by binding to angiotensin-converting enzyme 2 (ACE2) through the RBD of the S protein. The SARS-CoV-2 virus may also enter host cells using the CD147 (basigin, EMMPRIN) host cell receptor. The embodiments disclosed herein can be applied to other coronaviruses, including but not limited to HCoV-229E, HCoV-OC43, SARS-CoV-1, HCoV NL63, HKU1, and MERS-CoV. An exemplary sequence for the SARS-CoV-2 spike (S) protein (NBCI Reference No. QHD43416.1) is shown in SEQ ID NO: 819. An exemplary sequence for human angiotensin-converting enzyme 2 (ACE2) is shown in SEQ ID NO: 820. An exemplary sequence for human CD147 (basigin, EMMPRIN) (NCBI Reference No. Q54A51) is shown in SEQ ID NO: 821.

[0069] The terms “sequela” or “sequelae” as used herein refer to the diseases, disorders, or conditions that develop as a result of a previous disease, disorder, or condition. As coronaviruses such as SARS-CoV-2 are respiratory viruses, complications involving the lungs are common sequelae of a coronavirus infection. This includes pulmonary fibrosis and/or pulmonary edema. Other sequelae observed in patients afflicted with COVID-19 include but are not limited to other fibroses, cardiovascular disease, thrombosis, neurological disease, kidney disease, or liver disease.

[0070] The terms “cytokine release syndrome” (CRS) or “cytokine storm” as used herein refer to an uncontrolled release of proinflammatory cytokines by immune cells, including T cells, natural killer cells, macrophages, dendritic cells, B cells, monocytes, neutrophils, leukocytes, lymphocytes, in response to a disease, infection, or immunotherapy. CRS is caused by an infectious stimuli, non-infectious stimuli, condition, or syndrome, or any combination thereof. Diseases or infections that can cause CRS include but are not limited to bacterial infections, viral infections, fungal infections, protozoan infections, graft-versus-host disease, cytomegalovirus, Epstein-Barr virus, hemophagocytic lymphohistiocystosis (HLH), Epstein-Barr virus-associated HLH, sporadic HLH, macrophage activation syndrome (MAS), chronic arthritis, systemic Juvenile idiopathic Arthritis (sJIA), Still's Disease, Cryopyrin-associated Periodic Syndrome (CAPS), Familial Cold Auto-inflammatory Syndrome (FCAS), Familial Cold Urticaria (FCU), Muckle-Well Syndrome (MWS), Chronic Infantile Neurological Cutaneous and Articular (CINCA) Syndrome, cryopyrinopathy comprising inherited or de novo gain of function mutations in the NLRP3 gene, a hereditary auto-inflammatory disorder, acute pancreatitis, severe burns, trauma, acute respiratory distress syndrome (ARDS), Streptococcus, Pseudomonas, influenza, bird flu, H5N1, H1N1, variola virus, coronavirus, severe acute respiratory syndrome (SARS), SARS-CoV-1, SARS-CoV-2, sepsis, gram-negative sepsis, Gram-positive toxins, malaria, Ebola virus, variola virus, systemic Gram-negative bacterial infection, bacteremia, Jarisch-Herxheimer syndrome, glycosylphosphatidylinositol (GPI), or lipopolysaccharide. Immunotherapies that can cause CRS include but are not limited to rituximab, obinutuzumab, alemtuzumab, brentuximab, dacetuzumab, nivolumab, theralizumab, oxaliplatin, lenalidomide, T-cell engager molecules, bi-specific T-cell engager (BiTE) molecules, or CAR T therapy. CRS can be treated using anti-inflammatory therapies, including but not limited to anti-cytokine antibodies, angiotensin-converting enzyme inhibitors, angiotensin II receptor blockers, corticosteroids, free radical scavengers, or TNF-α blockers.

[0071] As used herein, the term “cytokine” refers to small proteins, polypeptides, or peptides that are involved in inflammatory signaling or proteins released by one cell population that act on another cell as intercellular mediators or have an autocrine effect on the cells producing the proteins. Cytokines include but are not limited to chemokines, interferons, interleukins, lymphokines, monokines, tumor necrosis factors, CCL1, CCl2, CCL3, CCL4, CCL5, CCL6, CCL7, CCL8, CCL9, CCL11, CCL12, CCL13, CCL14, CCL15, CCL16, CCL17, CCL18, CCL19, CCL20, CCL21, CCL22, CCL23, CCL24, CCL25, CCL26, CCL27, CCL28, CXCL1, CXCL2, CXCL3, CXCL4, CXCL5, CXCL6, CXCL7, CXCL8, CXCL9, CXCL10, CXCL11, CXCL12, CXCL13, CXCL14, CXCL15, CXCL16, CXCL17, CX3CL1, XCL1, XCL2, INFα, INFβ, INFγ, IL-1, IL-la, IL-2, IL-3, IL-4, IL-5, IL-6, IL-7, IL-8, IL-9, IL-10, IL-11, IL-12, IL-13, IL-14, IL-15, IL-16, IL-17, IL-17A-F, IL-18, IL-19, IL-20, IL-21, IL-22, IL-23, IL-24, IL-25, IL-26, IL-27, IL-28, IL-29, IL-30, IL-31, IL-32, IL-33, IL-34, IL-35, IL-36, IL-37, IL-38, adesleukin, GM-CSF, TNFα, TNFβ, TNFγ, TGF-I-3 TNFSF4, TNFSF5, TNFSF6, TNFSF7, TNFSF8, TNFSF9, TNFSF10, TNFSF11, TNFSF12, TNFSF13, TNFSF13B, TNFSF14, TNFSF15, TNFSF18, or TNFSF19, leukemia inhibitor factor (LIF), ciliary neurotrophic factor (CNTF), CNTF-like cytokine (CLC), cardiotrophin (CT), Kit ligand (KL), or any combination thereof.

[0072] As used herein, the terms “individual(s)”, “subject(s)” and “patient(s)” mean any mammal. In some embodiments, the mammal is a human. In some embodiments, the mammal is a non-human. None of the terms require or are limited to situations characterized by the supervision (e.g. constant or intermittent) of a health care worker (e.g. a doctor, a registered nurse, a nurse practitioner, a physician's assistant, an orderly or a hospice worker).

[0073] As used herein, the terms “polypeptide”, “peptide”, and “protein” are used interchangeably herein to refer to polymers of amino acids of any length. The polymer may be linear, cyclic, or branched, it may comprise modified amino acids, and it may be interrupted by non-amino acids. The terms also encompass amino acid polymers that have been modified, for example, via sulfation, glycosylation, lipidation, acetylation, phosphorylation, iodination, methylation, oxidation, proteolytic processing, phosphorylation, prenylation, racemization, selenoylation, transfer-RNA mediated addition of amino acids to proteins such as arginylation, ubiquitination, or any other manipulation, such as conjugation with a labeling component.

[0074] As used herein, the term “amino acid” refers to either natural and/or unnatural or synthetic amino acids, including glycine and both the D or L optical isomers, and amino acid analogs and peptidomimetics.

[0075] A polypeptide or amino acid sequence “derived from” a designated protein refers to the origin of the polypeptide. Preferably, the polypeptide has an amino acid sequence that is essentially identical to that of a polypeptide encoded in the sequence, or a portion thereof wherein the portion consists of at least 10-20 amino acids, or at least 20-30 amino acids, or at least 30-50 amino acids, or which is immunologically identifiable with a polypeptide encoded in the sequence. This terminology also includes a polypeptide expressed from a designated nucleic acid sequence.

[0076] As used herein, the term “antibody” is intended to include any polypeptide chain-containing molecular structure with a specific shape that fits to and recognizes an epitope, where one or more non-covalent binding interactions stabilize the complex between the molecular structure and the epitope. Antibodies utilized in the present invention may be polyclonal antibodies, although monoclonal antibodies are preferred because they may be reproduced by cell culture or recombinantly and can be modified to reduce their antigenicity.

[0077] In addition to entire immunoglobulins (or their recombinant counterparts), immunoglobulin fragments or “binding fragments” comprising the epitope binding site (e.g., Fab′, F(ab′)₂, single-chain variable fragment (scFv), diabody, minibody, nanobody, single-domain antibody (sdAb), or other fragments) are useful as antibody moieties in the present invention. Such antibody fragments may be generated from whole immunoglobulins by ricin, pepsin, papain, or other protease cleavage. Minimal immunoglobulins may be designed utilizing recombinant immunoglobulin techniques. For instance “Fv” immunoglobulins for use in the present invention may be produced by linking a variable light chain region to a variable heavy chain region via a peptide linker (e.g., poly-glycine or another sequence which does not form an alpha helix or beta sheet motif). Nanobodies or single-domain antibodies can also be derived from alternative organisms, such as dromedaries, camels, llamas, alpacas, or sharks. In some embodiments, antibodies can be conjugates, e.g. pegylated antibodies, drug, radioisotope, or toxin conjugates. Monoclonal antibodies directed against a specific epitope, or combination of epitopes, will allow for the targeting and/or depletion of cellular populations expressing the marker. Various techniques can be utilized using monoclonal antibodies to screen for cellular populations expressing the marker(s), and include magnetic separation using antibody-coated magnetic beads, “panning” with antibody attached to a solid matrix (i.e., plate), and flow cytometry (e.g. U.S. Pat. No. 5,985,660, hereby expressly incorporated by reference in its entirety).

[0078] As known in the art, the term “Fc region” is used to define a C-terminal region of an immunoglobulin heavy chain. The “Fc region” may be a native sequence Fc region or a variant Fc region. Although the boundaries of the Fc region of an immunoglobulin heavy chain might vary, the human IgG heavy chain Fc region is usually defined to stretch from an amino acid residue at position Cys226, or from Pro230, to the carboxyl-terminus thereof. The numbering of the residues in the Fc region is that of the EU index as in Kabat. Kabat et al., Sequences of Proteins of Immunological Interest, 5th Ed. Public Health Service, National Institutes of Health, Bethesda, Md., 1991. The Fc region of an immunoglobulin generally comprises two constant domains, CH2 and CH3. As is known in the art, an Fc region can be present in dimer or monomeric form.

[0079] As known in the art, a “constant region” of an antibody refers to the constant region of the antibody light chain or the constant region of the antibody heavy chain, either alone or in combination.

[0080] A “variable region” of an antibody refers to the variable region of the antibody light chain or the variable region of the antibody heavy chain, either alone or in combination. As known in the art, the variable regions of the heavy and light chains each consist of four framework regions (FRs) connected by three complementarity determining regions (CDRs) also known as hypervariable regions, and contribute to the formation of the antigen binding site of antibodies. If variants of a subject variable region are desired, particularly with substitution in amino acid residues outside of a CDR region (i.e., in the framework region), appropriate amino acid substitution, preferably, conservative amino acid substitution, can be identified by comparing the subject variable region to the variable regions of other antibodies which contain CDR1 and CDR2 sequences in the same canonical class as the subject variable region (Chothia and Lesk, J Mol Biol 196(4): 901-917, 1987).

[0081] In certain embodiments, definitive delineation of a CDR and identification of residues comprising the binding site of an antibody is accomplished by solving the structure of the antibody and/or solving the structure of the antibody-ligand complex. In certain embodiments, that can be accomplished by any of a variety of techniques known to those skilled in the art, such as X-ray crystallography. In certain embodiments, various methods of analysis can be employed to identify or approximate the CDR regions. In certain embodiments, various methods of analysis can be employed to identify or approximate the CDR regions. Examples of such methods include, but are not limited to, the Kabat definition, the Chothia definition, the IMGT approach (Lefranc et al., 2003) Dev Comp Immunol. 27:55-77), computational programs such as Paratome (Kunik et al., 2012, Nucl Acids Res. W521-4), the AbM definition, and the conformational definition.

[0082] The Kabat definition is a standard for numbering the residues in an antibody and is typically used to identify CDR regions. See, e.g., Johnson & Wu, 2000, Nucleic Acids Res., 28: 214-8. The Chothia definition is similar to the Kabat definition, but the Chothia definition takes into account positions of certain structural loop regions. See, e.g., Chothia et al., 1986, J. Mol. Biol., 196: 901-17; Chothia et al., 1989, Nature, 342: 877-83. The AbM definition uses an integrated suite of computer programs produced by Oxford Molecular Group that model antibody structure. See, e.g., Martin et al., 1989, Proc Natl Acad Sci (USA), 86:9268-9272; “AbM™, A Computer Program for Modeling Variable Regions of Antibodies,” Oxford, UK; Oxford Molecular, Ltd. The AbM definition models the tertiary structure of an antibody from primary sequence using a combination of knowledge databases and ab initio methods, such as those described by Samudrala et al., 1999, “Ab Initio Protein Structure Prediction Using a Combined Hierarchical Approach,” in PROTEINS, Structure, Function and Genetics Suppl., 3:194-198. The contact definition is based on an analysis of the available complex crystal structures. See, e.g., MacCallum et al., 1996, J. Mol. Biol., 5:732-45. In another approach, referred to herein as the “conformational definition” of CDRs, the positions of the CDRs may be identified as the residues that make enthalpic contributions to antigen binding. See, e.g., Makabe et al., 2008, Journal of Biological Chemistry, 283:1156-1166. Still other CDR boundary definitions may not strictly follow one of the above approaches, but will nonetheless overlap with at least a portion of the Kabat CDRs, although they may be shortened or lengthened in light of prediction or experimental findings that particular residues or groups of residues do not significantly impact antigen binding. As used herein, a CDR may refer to CDRs defined by any approach known in the art, including combinations of approaches. The methods used herein may utilize CDRs defined according to any of these approaches. For any given embodiment containing more than one CDR, the CDRs may be defined in accordance with any of Kabat, Chothia, extended, IMGT, Paratome, AbM, and/or conformational definitions, or a combination of any of the foregoing.

[0083] As disclosed herein, sequences having a % identity to any of the sequences disclosed herein are envisioned and may be used. The terms “% identity” refer to the percentage of units (i.e. amino acids or nucleotides) that are the same between two or more sequences relative to the length of the sequence. When the two or more sequences being compared are the same length, the % identity will be respective that length. When two or more sequences being compared are different lengths, deletions and/or insertions may be introduced to obtain the best alignment. In some embodiments, these sequences may include peptide sequences, nucleic acid sequences, CDR sequences, variable region sequences, or heavy or light chain sequences. In some embodiments, any sequence having at least 80%, 81%, 82%, 83%, 84%, 85%, 86%, 87%, 88%, 89%, 90%, 91%, 92%, 93%, 94%, 95%, 96%, 97%, 98%, 99%, or 100% sequence identity to any of the sequences disclosed herein may be used. In some embodiments, any sequence having at least 0, 1, 2, 3, 4, 5, 6, 7, 8, 9, 10, 11, 12, 13, 14, 15, 16, 17, 18, 19, 20, 21, 22, 23, 24, 25, 26, 27, 28, 29, 30, 31, 32, 33, 34, 35, 36, 37, 38, 39, 40, 41, 42, 43, 44, 45, 46, 47, 48, 49, or 50 substitutions, deletions, or additions relative to any of the sequences disclosed herein may be used. The changes in sequences may apply to, for example, single amino acids, single nucleic acid bases, or nucleic acid codons; however, differences in longer stretches of sequences are also envisioned.

[0084] As applied to antibody sequences, these differences in sequences may apply to antigen-binding regions (e.g., CDRs) or regions that do not bind to antigens or are only secondary to antigen binding (e.g., framework regions).

[0085] As disclosed herein, sequences having a % homology to any of the sequences disclosed herein are envisioned and may be used. The term “% homology” refers to the degree of conservation between two sequences when considering their three-dimensional structure. For example, homology between two protein sequences may be dependent on structural motifs, such as beta strands, alpha helices, and other folds, as well as their distribution throughout the sequence. Homology may be determined through structural determination, either empirically or in silico. In some embodiments, any sequence having at least 80%, 81%, 82%, 83%, 84%, 85%, 86%, 87%, 88%, 89%, 90%, 91%, 92%, 93%, 94%, 95%, 96%, 97%, 98%, 99%, or 100% sequence homology to any of the sequences disclosed herein may be used. In some embodiments, any sequence having at least 0, 1, 2, 3, 4, 5, 6, 7, 8, 9, 10, 11, 12, 13, 14, 15, 16, 17, 18, 19, 20, 21, 22, 23, 24, 25, 26, 27, 28, 29, 30, 31, 32, 33, 34, 35, 36, 37, 38, 39, 40, 41, 42, 43, 44, 45, 46, 47, 48, 49, or 50 substitutions, deletions, or additions relative to any of the sequences disclosed herein, which may or may not affect the overall % homology, may be used.

[0086] As applied herein, sequences having a certain % similarity to any of the sequence disclosed herein are envisioned and may be used. In some embodiments, these sequences may include peptide sequences, nucleic acid sequences, CDR sequences, variable region sequences, or heavy or light chain sequences. As understood in the art with respect to peptide sequences, “similarity” refers to the comparison of amino acids based on their properties, including but not limited to size, polarity, charge, pK, aromaticity, hydrogen bonding properties, or presence of functional groups (e.g. hydroxyl, thiol, amine, carboxyl, and the like). The term “% similarity” refers to the percentage of units (i.e. amino acids) that are the same between two or more sequences relative to the length of the sequence. When the two or more sequences being compared are the same length, the % similarity will be respective that length. When two or more sequences being compared are different lengths, deletions and/or insertions may be introduced to obtain the best alignment. The similarity of two amino acids may dictate whether a certain substitution is conservative or non-conservative. Methods of determining the conservativeness of an amino acid substitution are generally known in the art and may involve substitution matrices. Commonly used substitution matrices include BLOSUM45, BLOSUM62, BLOSUM80, PAM100, PAM120, PAM160, PAM200, PAM250, but other substitution matrices or approaches may be used as considered appropriate by the skilled person. A certain substitution matrix may be preferential over the others when considering aspects such as stringency, conservation and/or divergence of related sequences (e.g. within the same species or broader), and length of the sequences in question. As used herein, a peptide sequence having a certain % similarity to another sequence will have up to that % of amino acids that are either identical or an acceptable substitution as governed by the method of similarity determination used. In some embodiments, a sequence having at least 80%, 81%, 82%, 83%, 84%, 85%, 86%, 87%, 88%, 89%, 90%, 91%, 92%, 93%, 94%, 95%, 96%, 97%, 98%, 99%, or 100% sequence similarity to any of the sequences disclosed herein may be used. In some embodiments, any sequence having at least 0, 1, 2, 3, 4, 5, 6, 7, 8, 9, 10, 11, 12, 13, 14, 15, 16, 17, 18, 19, 20, 21, 22, 23, 24, 25, 26, 27, 28, 29, 30, 31, 32, 33, 34, 35, 36, 37, 38, 39, 40, 41, 42, 43, 44, 45, 46, 47, 48, 49, or 50 similar substitutions relative to any of the sequences disclosed herein may be used. As applied to antibody sequences, these similar substitutions may apply to antigen-binding regions (i.e. CDRs) or regions that do not bind to antigens or are only secondary to antigen binding (i.e. framework regions).

[0087] The term “consensus sequence” as used herein with regard to sequences refers to the generalized sequence representing all of the different combinations of permissible amino acids at each location of a group of sequences. A consensus sequence may provide insight into the conserved regions of related sequences where the unit (e.g. amino acid or nucleotide) is the same in most or all of the sequences, and regions that exhibit divergence between sequences. In the case of antibodies, the consensus sequence of a CDR may indicate amino acids that are important or dispensable for antigen binding. It is envisioned that consensus sequences may be prepared with any of the sequences provided herein, and the resultant various sequences derived from the consensus sequence can be validated to have similar effects as the template sequences.

[0088] The term “compete,” as used herein with regard to an antibody, means that a first antibody, or an antigen-binding portion thereof, binds to an epitope in a manner sufficiently similar to the binding of a second antibody, or an antigen-binding portion thereof, such that the result of binding of the first antibody with its cognate epitope is detectably decreased in the presence of the second antibody compared to the binding of the first antibody in the absence of the second antibody. The alternative, where the binding of the second antibody to its epitope is also detectably decreased in the presence of the first antibody, can, but need not be the case. That is, a first antibody can inhibit the binding of a second antibody to its epitope without that second antibody inhibiting the binding of the first antibody to its respective epitope. However, where each antibody detectably inhibits the binding of the other antibody with its cognate epitope or ligand, whether to the same, greater, or lesser extent, the antibodies are said to “cross-compete” with each other for binding of their respective epitope(s). Both competing and cross-competing antibodies are encompassed by the present invention. Regardless of the mechanism by which such competition or cross-competition occurs (e.g., steric hindrance, conformational change, or binding to a common epitope, or portion thereof), the skilled artisan would appreciate, based upon the teachings provided herein, that such competing and/or cross-competing antibodies are encompassed and can be useful for the methods disclosed herein.

[0089] An antibody that “preferentially binds” or “specifically binds” (used interchangeably herein) to an epitope is a term well understood in the art, and methods to determine such specific or preferential binding are also well known in the art. A molecule is said to exhibit “specific binding” or “preferential binding” if it reacts or associates more frequently, and/or more rapidly, and/or with greater duration and/or with greater affinity with a particular cell or substance than it does with alternative cells or substances. An antibody “specifically binds” or “preferentially binds” to a target if it binds with greater affinity, and/or avidity, and/or more readily, and/or with greater duration than it binds to other substances. For example, an antibody that specifically or preferentially binds to a CFD epitope is an antibody that binds this epitope with greater affinity, and/or avidity, and/or more readily, and/or with greater duration than it binds to other CFD epitopes or non-CFD epitopes. It is also understood by reading this definition that, for example, an antibody (or moiety or epitope) that specifically or preferentially binds to a first target may or may not specifically or preferentially bind to a second target. As such, “specific binding” or “preferential binding” does not necessarily require (although it can include) exclusive binding. Generally, but not necessarily, reference to binding means preferential binding.

[0090] As used herein, the term “antigen binding molecule” refers to a molecule that comprises an antigen binding portion that binds to an antigen and, optionally, a scaffold or framework portion that allows the antigen binding portion to adopt a conformation that promotes binding of the antigen binding portion or provides some additional properties to the antigen binding molecule. In some embodiments, the antigen is Gal3. In some embodiments, the antigen binding portion comprises at least one CDR from an antibody that binds to the antigen. In some embodiments, the antigen binding portion comprises all three CDRs from a heavy chain of an antibody that binds to the antigen or from a light chain of an antibody that binds to the antigen. In some embodiments, the antigen binding portion comprises all six CDRs from an antibody that binds to the antigen (three from the heavy chain and three from the light chain). In some embodiments, the antigen binding portion is an antibody fragment.

[0091] Non-limiting examples of antigen binding molecules include antibodies, antibody fragments (e.g., an antigen binding fragment of an antibody), antibody derivatives, and antibody analogs. Further specific examples include, but are not limited to, a single-chain variable fragment (scFv), a nanobody (e.g. VH domain of camelid heavy chain antibodies; VHH fragment, see Cortez-Retamozo et al., Cancer Research, Vol. 64:2853-57, 2004), a Fab fragment, a Fab′ fragment, a F(ab′)2 fragment, a Fv fragment, a Fd fragment, and a complementarity determining region (CDR) fragment. These molecules can be derived from any mammalian source, such as human, mouse, rat, rabbit, pig, dog, cat, horse, donkey, guinea pig, goat, or camelid. Antibody fragments may compete for binding of a target antigen with an intact antibody and the fragments may be produced by the modification of intact antibodies (e.g. enzymatic or chemical cleavage) or synthesized de novo using recombinant DNA technologies or peptide synthesis. The antigen binding molecule can comprise, for example, an alternative protein scaffold or artificial scaffold with grafted CDRs or CDR derivatives. Such scaffolds include, but are not limited to, antibody-derived scaffolds comprising mutations introduced to, for example, stabilize the three-dimensional structure of the antigen binding molecule as well as wholly synthetic scaffolds comprising, for example, a biocompatible polymer. See, for example, Korndorfer et al., 2003, Proteins: Structure, Function, and Bioinformatics, Volume 53, Issue 1:121-129 (2003); Roque et al., Biotechnol. Prog. 20:639-654 (2004). In addition, peptide antibody mimetics (“PAMs”) can be used, as well as scaffolds based on antibody mimetics utilizing fibronectin components as a scaffold.

[0092] An antigen binding molecule can also include a protein comprising one or more antibody fragments incorporated into a single polypeptide chain or into multiple polypeptide chains. For instance, antigen binding molecule can include, but are not limited to, a diabody (see, e.g., EP 404,097; WO 93/11161; and Hollinger et al., Proc. Natl. Acad. Sci. USA, Vol. 90:6444-6448, 1993); an intrabody; a domain antibody (single VL or VH domain or two or more VH domains joined by a peptide linker; see Ward et al., Nature, Vol. 341:544-546, 1989); a maxibody (2 scFvs fused to Fc region, see Fredericks et al., Protein Engineering, Design & Selection, Vol. 17:95-106, 2004 and Powers et al., Journal of Immunological Methods, Vol. 251:123-135, 2001); a triabody; a tetrabody; a minibody (scFv fused to CH3 domain; see Olafsen et al., Protein Eng Des Sel., Vol. 17:315-23, 2004); a peptibody (one or more peptides attached to an Fc region, see WO 00/24782); a linear antibody (a pair of tandem Fd segments (VH-CH1-VH-CH1) which, together with complementary light chain polypeptides, form a pair of antigen binding regions, see Zapata et al., Protein Eng., Vol. 8:1057-1062, 1995); a small modular immunopharmaceutical (see U.S. Patent Publication No. 20030133939); and immunoglobulin fusion proteins (e.g. IgG-scFv, IgG-Fab, 2scFv-IgG, 4scFv-IgG, VH-IgG, IgG-VH, and Fab-scFv-Fc).

[0093] In certain embodiments, an antigen binding molecule can have, for example, the structure of an immunoglobulin. An “immunoglobulin” is a tetrameric molecule, with each tetramer comprising two identical pairs of polypeptide chains, each pair having one “light” (about 25 kDa) and one “heavy” chain (about 50-70 kDa). The amino-terminal portion of each chain includes a variable region of about 100 to 110 or more amino acids primarily responsible for antigen recognition. The carboxy-terminal portion of each chain defines a constant region primarily responsible for effector function.

[0094] Unless otherwise specified, the complementarity defining regions disclosed herein follow the IMGT definition. In some embodiments, the CDRs can instead by Kabat, Chothia, or other definitions accepted by those of skill in the art.

[0095] As used herein, the term “humanized” as applies to a non-human (e.g. rodent or primate) antibodies are hybrid immunoglobulins, immunoglobulin chains or fragments thereof which contain minimal sequence derived from non-human immunoglobulin.

[0096] As used herein, the terms “treating” or “treatment” (and as well understood in the art) means an approach for obtaining beneficial or desired results in a subject's condition, including clinical results. Beneficial or desired clinical results can include, but are not limited to, alleviation or amelioration of one or more symptoms or conditions, diminishment of the extent of a disease, stabilizing (i.e., not worsening) the state of disease, prevention of a disease's transmission or spread, delaying or slowing of disease progression, amelioration or palliation of the disease state, diminishment of the reoccurrence of disease, and remission, whether partial or total and whether detectable or undetectable. “Treating” and “treatment” as used herein also include prophylactic treatment. Treatment methods comprise administering to a subject a therapeutically effective amount of an active agent. The administering step may consist of a single administration or may comprise a series of administrations. The compositions are administered to the subject in an amount and for a duration sufficient to treat the patient. The length of the treatment period depends on a variety of factors, such as the severity of the condition, the age and genetic profile of the patient, the concentration of active agent, the activity of the compositions used in the treatment, or a combination thereof. It will also be appreciated that the effective dosage of an agent used for the treatment or prophylaxis may increase or decrease over the course of a particular treatment or prophylaxis regime. Changes in dosage may result and become apparent by standard diagnostic assays known in the art. In some embodiments, chronic administration may be required.

[0097] The terms “effective amount” or “effective dose” as used herein have their plain and ordinary meaning as understood in light of the specification, and refer to that amount of a recited composition or compound that results in an observable designated effect. Actual dosage levels of active ingredients in an active composition of the presently disclosed subject matter can be varied so as to administer an amount of the active composition or compound that is effective to achieve the designated response for a particular subject and/or application. The selected dosage level can vary based upon a variety of factors including, but not limited to, the activity of the composition, formulation, route of administration, combination with other drugs or treatments, severity of the condition being treated, and the physical condition and prior medical history of the subject being treated. In some embodiments, a minimal dose is administered, and dose is escalated in the absence of dose-limiting toxicity to a minimally effective amount. Determination and adjustment of an effective dose, as well as evaluation of when and how to make such adjustments, are contemplated herein.

[0098] In some non-limiting embodiments, an effective amount or effective dose of a composition or compound may relate to the amount or dose that provides a significant, measurable, or sufficient therapeutic effect towards the treatment of a coronavirus infection, such as a SARS-CoV-2 infection. In some embodiments, the effective amount or effective dose of a composition or compound may treat, ameliorate, or prevent the progression of inflammation, shortness of breath, fatigue, pulmonary damage, or other symptoms associated with a coronavirus infection, such as a SARS-CoV-2 infection. In some embodiments, the effective amount or effective dose of a composition or compound may treat, ameliorate, or prevent the progression of a pulmonary inflammatory disease, such as COPD, or an autoimmune disease, such as systemic lupus erythematosus. In some embodiments, the effective amount or effective dose of a composition or compound may treat, ameliorate, or prevent the progression of inflammation (which might not be associated with a viral or other pathogenic infection) and symptoms and/or causes thereof, including neutrophil activation and migration.

[0099] The term “administering” includes oral administration, topical contact, administration as a suppository, intravenous, intraperitoneal, intramuscular, intralesional, intrathecal, intranasal, or subcutaneous administration, or the implantation of a slow-release device, e.g., a mini-osmotic pump, to a subject. Administration is by any route, including parenteral and transmucosal (e.g., buccal, sublingual, palatal, gingival, nasal, vaginal, rectal, or transdermal). Parenteral administration includes, e.g., intravenous, intramuscular, intra-arteriole, intradermal, subcutaneous, intraperitoneal, intraventricular, and intracranial. Other modes of delivery include, but are not limited to, the use of liposomal formulations, intravenous infusion, transdermal patches, etc. By “co-administer” it is meant that a first compound described herein is administered at the same time, just prior to, or just after the administration of a second compound described herein.

[0100] As used herein, the term “therapeutic target” refers to a gene or gene product that, upon modulation of its activity (e.g., by modulation of expression, biological activity, and the like), can provide for modulation of the disease phenotype. As used throughout, “modulation” is meant to refer to an increase or a decrease in the indicated phenomenon (e.g., modulation of a biological activity refers to an increase in a biological activity or a decrease in a biological activity).

[0101] As used herein, “pharmaceutically acceptable” has its plain and ordinary meaning as understood in light of the specification and refers to carriers, excipients, and/or stabilizers that are nontoxic to the cell or mammal being exposed thereto at the dosages and concentrations employed or that have an acceptable level of toxicity. A “pharmaceutically acceptable” “diluent,” “excipient,” and/or “carrier” as used herein have their plain and ordinary meaning as understood in light of the specification and are intended to include any and all solvents, dispersion media, coatings, antibacterial and antifungal agents, isotonic and absorption delaying agents, and the like, compatible with administration to humans, cats, dogs, or other vertebrate hosts. Typically, a pharmaceutically acceptable diluent, excipient, and/or carrier is a diluent, excipient, and/or carrier approved by a regulatory agency of a Federal, a state government, or other regulatory agency, or listed in the U.S. Pharmacopeia or other generally recognized pharmacopeia for use in animals, including humans as well as non-human mammals, such as cats and dogs. The term diluent, excipient, and/or carrier can refer to a diluent, adjuvant, excipient, or vehicle with which the pharmaceutical formulation is administered. Such pharmaceutical diluent, excipient, and/or carriers can be sterile liquids, such as water and oils, including those of petroleum, animal, vegetable or synthetic origin. Water, saline solutions and aqueous dextrose and glycerol solutions can be employed as liquid diluents, excipients, and/or carriers, particularly for injectable solutions. Suitable pharmaceutical diluents and/or excipients include sugars, starch, glucose, fructose, lactose, sucrose, maltose, gelatin, malt, rice, flour, chalk, silica gel, sodium stearate, glycerol monostearate, talc, salts, sodium chloride, dried skim milk, glycerol, propylene, glycol, water, ethanol and the like. A non-limiting example of a physiologically acceptable carrier is an aqueous pH buffered solution. The physiologically acceptable carrier may also comprise one or more of the following: antioxidants, such as ascorbic acid, low molecular weight (less than about 10 residues) polypeptides, proteins, such as serum albumin, gelatin, immunoglobulins, hydrophilic polymers such as polyvinylpyrrolidone, amino acids, carbohydrates such as glucose, mannose, or dextrins, chelating agents such as EDTA, sugar alcohols such as glycerol, erythritol, threitol, arabitol, xylitol, ribitol, mannitol, sorbitol, galactitol, fucitol, iditol, inositol, isomalt, maltitol, or lactitol, salt-forming counterions such as sodium, and nonionic surfactants such as TWEEN®, polyethylene glycol (PEG), and PLURONICS®. The formulation, if desired, can also contain minor amounts of wetting, bulking, emulsifying agents, or pH buffering agents. These formulations can take the form of solutions, suspensions, emulsion, sustained release formulations and the like. The formulation should suit the mode of administration.

[0102] The term “pharmaceutically acceptable salts” has its plain and ordinary meaning as understood in light of the specification and includes relatively non-toxic, inorganic and organic acid, or base addition salts of compositions or excipients, including without limitation, analgesic agents, therapeutic agents, other materials, and the like. Examples of pharmaceutically acceptable salts include those derived from mineral acids, such as hydrochloric acid and sulfuric acid, and those derived from organic acids, such as ethanesulfonic acid, benzenesulfonic acid, p-toluenesulfonic acid, and the like. Examples of suitable inorganic bases for the formation of salts include the hydroxides, carbonates, and bicarbonates of ammonia, sodium, lithium, potassium, calcium, magnesium, aluminum, zinc, and the like. Salts may also be formed with suitable organic bases, including those that are non-toxic and strong enough to form such salts. For example, the class of such organic bases may include but are not limited to mono-, di-, and trialkylamines, including methylamine, dimethylamine, and triethylamine; mono-, di-, or trihydroxyalkylamines including mono-, di-, and triethanolamine; amino acids, including glycine, arginine and lysine; guanidine; N-methylglucosamine; N-methylglucamine; L-glutamine; N-methylpiperazine; morpholine; ethylenediamine; N-benzylphenethylamine; trihydroxymethyl aminoethane.

[0103] As used herein, a “carrier” refers to a compound, particle, solid, semi-solid, liquid, or diluent that facilitates the passage, delivery and/or incorporation of a compound to cells, tissues and/or bodily organs. For example, without limitation, a lipid nanoparticle (LNP) is a type of carrier that can encapsulate an oligonucleotide to thereby protect the oligonucleotide from degradation during passage through the bloodstream and/or to facilitate delivery to a desired organ, such as to the lungs.

[0104] As used herein, a “diluent” refers to an ingredient in a pharmaceutical composition that lacks pharmacological activity but may be pharmaceutically necessary or desirable. For example, a diluent may be used to increase the bulk of a potent drug whose mass is too small for manufacture and/or administration. It may also be a liquid for the dissolution of a drug to be administered by injection, ingestion or inhalation. A common form of diluent in the art is a buffered aqueous solution such as, without limitation, phosphate buffered saline that mimics the composition of human blood.

[0105] The term “excipient” has its ordinary meaning as understood in light of the specification, and refers to inert substances, compounds, or materials added to a pharmaceutical composition to provide, without limitation, bulk, consistency, stability, binding ability, lubrication, disintegrating ability etc., to the composition. Excipients with desirable properties include but are not limited to preservatives, adjuvants, stabilizers, solvents, buffers, diluents, solubilizing agents, detergents, surfactants, chelating agents, antioxidants, alcohols, ketones, aldehydes, ethylenediaminetetraacetic acid (EDTA), citric acid, salts, sodium chloride, sodium bicarbonate, sodium phosphate, sodium borate, sodium citrate, potassium chloride, potassium phosphate, magnesium sulfate sugars, dextrose, dextran, fructose, mannose, lactose, galactose, sucrose, sorbitol, cellulose, methyl cellulose, hydroxypropyl methyl cellulose (hypromellose), glycerin, polyvinyl alcohol, povidone, propylene glycol, serum, amino acids, polyethylene glycol, polysorbate 20, polysorbate 80, sodium deoxycholate, sodium taurodeoxycholate, magnesium stearate, octylphenol ethoxylate, benzethonium chloride, thimerosal, gelatin, esters, ethers, 2-phenoxyethanol, urea, or vitamins, or any combination thereof. The amount of the excipient may be found in a pharmaceutical composition at a percentage of 0%, 0.1%, 0.2%, 0.3%, 0.4%, 0.5%, 0.6%, 0.7%, 0.8%, 0.9%, 1%, 2%, 3%, 4%, 5%, 6%, 7%, 8%, 9%, 10%, 20%, 30%, 40%, 50%, 60%, 70%, 80%, 90%, 95%, 100% w/w or any percentage by weight in a range defined by any two of the aforementioned numbers.

[0106] Additional excipients with desirable properties include but are not limited to preservatives, adjuvants, stabilizers, solvents, buffers, diluents, solubilizing agents, detergents, surfactants, chelating agents, antioxidants, alcohols, ketones, aldehydes, ethylenediaminetetraacetic acid (EDTA), tris(hydroxymethyl)aminomethane (Tris), citric acid, ascorbic acid, acetic acid, salts, phosphates, citrates, acetates, succinates, chlorides, bicarbonates, borates, sulfates, sodium chloride, sodium bicarbonate, sodium phosphate, sodium borate, sodium citrate, potassium chloride, potassium phosphate, magnesium sulfate sugars, dextrose, dextran 40, fructose, mannose, lactose, trehalose, galactose, sucrose, sorbitol, mannitol, cellulose, serum, amino acids, alanine, arginine, asparagine, aspartic acid, cysteine, glutamine, glutamic acid, glycine, histidine, isoleucine, leucine, lysine, methionine, phenylalanine, proline, serine, threonine, tryptophan, tyrosine, valine, polysorbate 20, polysorbate 40, polysorbate, 60, polysorbate 80, poloxamer, poloxamer 188, sodium deoxycholate, sodium taurodeoxycholate, magnesium stearate, octylphenol ethoxylate, benzethonium chloride, thimerosal, gelatin, esters, ethers, 2-phenoxyethanol, urea, or vitamins, or any combination thereof. Some excipients may be in residual amounts or contaminants from the process of manufacturing, including but not limited to serum, albumin, ovalbumin, antibiotics, inactivating agents, formaldehyde, glutaraldehyde, β-propiolactone, gelatin, cell debris, nucleic acids, peptides, amino acids, or growth medium components or any combination thereof. The amount of the excipient may be found in the formulation at a percentage that is at least 0%, 0.1%, 0.2%, 0.3%, 0.4%, 0.5%, 0.6%, 0.7%, 0.8%, 0.9%, 1%, 2%, 3%, 4%, 5%, 6%, 7%, 8%, 9%, 10%, 20%, 30%, 40%, 50%, 60%, 70%, 80%, 90%, 95%, 100% w/w or any percentage by weight in a range defined by any two of the aforementioned numbers.

[0107] The term “adjuvant” as used herein refers to a substance, compound, or material that stimulates the immune response and increase the efficacy of protective immunity and is administered in conjunction with an immunogenic antigen, epitope, or composition. Adjuvants serve to improve immune responses by enabling a continual release of antigen, up-regulation of cytokines and chemokines, cellular recruitment at the site of administration, increased antigen uptake and presentation in antigen presenting cells, or activation of antigen presenting cells and inflammasomes. Commonly used adjuvants include but are not limited to alum, aluminum salts, aluminum sulfate, aluminum hydroxide, aluminum phosphate, calcium phosphate hydroxide, potassium aluminum sulfate, oils, mineral oil, paraffin oil, oil-in-water emulsions, detergents, MF59®, squalene, AS03, α-tocopherol, polysorbate 80, AS04, monophosphoryl lipid A, virosomes, nucleic acids, polyinosinic:polycytidylic acid, saponins, QS-21, proteins, flagellin, cytokines, chemokines, IL-1, IL-2, IL-12, IL-15, IL-21, imidazoquinolines, CpG oligonucleotides, lipids, phospholipids, dioleoyl phosphatidylcholine (DOPC), trehalose dimycolate, peptidoglycans, bacterial extracts, lipopolysaccharides, or Freund's Adjuvant, or any combination thereof.

[0108] The term “purity” of any given substance, compound, or material as used herein refers to the actual abundance of the substance, compound, or material relative to the expected abundance. For example, the substance, compound, or material may be at least 80, 85, 90, 91, 92, 93, 94, 95, 96, 97, 98, 99, or 100% pure, including all decimals in between. Purity may be affected by unwanted impurities, including but not limited to side products, isomers, enantiomers, degradation products, solvent, carrier, vehicle, or contaminants, or any combination thereof. Purity can be measured technologies including but not limited to chromatography, liquid chromatography, gas chromatography, spectroscopy, UV-visible spectrometry, infrared spectrometry, mass spectrometry, nuclear magnetic resonance, gravimetry, or titration, or any combination thereof.

[0109] The term “immune cells” refers to cells of hematopoietic origin that are involved in the specific recognition of antigens. Immune cells include antigen presenting cells (APCs), such as dendritic cells or macrophages, B cells, T cells, natural killer cells, and myeloid cells, such as monocytes, macrophages, eosinophils, mast cells, basophils, and granulocytes.

[0110] The term “immune response” refers to T cell-mediated and/or B cell-mediated immune responses. Exemplary immune responses include B cell responses (e.g., antibody production) T cell responses (e.g., cytokine production, and cellular cytotoxicity) and activation of cytokine responsive cells, e.g., macrophages. The term “activating immune response” refers to enhancing the level of T-cell-mediated and/or B cell-mediated immune response, using methods known to one of skilled in the art. In one embodiment, the level of enhancement is at least 20-50%, alternatively at least 60%, at least 70%, at least 80%, at least 90%, at least 100%, at least 120%, at least 150%, or at least 200%.

[0111] As used herein, the term “standard of care”, “best practice” and “standard therapy” refers to the treatment that is accepted by medical practitioners to be an appropriate, proper, effective, and/or widely used treatment for a certain disease. The standard of care of a certain disease depends on many different factors, including the biological effect of treatment, region or location within the body, patient status (e.g. age, weight, gender, hereditary risks, other disabilities, secondary conditions), toxicity, metabolism, bioaccumulation, therapeutic index, dosage, and other factors known in the art. Determining a standard of care for a disease is also dependent on establishing safety and efficacy in clinical trials as standardized by regulatory bodies such as the US Food and Drug Administration, International Council for Harmonisation, Health Canada, European Medicines Agency, Therapeutics Goods Administration, Central Drugs Standard Control Organization, National Medical Products Administration, Pharmaceuticals and Medical Devices Agency, Ministry of Food and Drug Safety, and the World Health Organization. The standard of care for a disease may include but is not limited to surgery, radiation, chemotherapy, targeted therapy, or immunotherapy.

[0112] The term “% w/w” or “% wt/wt” means a percentage expressed in terms of the weight of the ingredient or agent over the total weight of the composition multiplied by 100.

### Exemplary Anti-Gal3 Antibodies and Binding Fragments Thereof

[0113] In some embodiments, antibodies or binding fragments thereof are provided. In some embodiments, the antibodies are anti-Gal3 antibodies or binding fragments thereof. In some embodiments, the anti-Gal3 antibodies or binding fragments thereof comprise a light chain variable region comprising a V_{L}-CDR1, a V_{L}-CDR2, and a VL-CDR3. In some embodiments, the anti-Gal3 antibodies or binding fragments thereof comprises a heavy chain variable region comprising a V_{H}-CDR1, a V_{H}-CDR2, and a V_{H}-CDR3. In some embodiments, the V_{L}-CDR1 comprises an amino acid sequence having at least 60%, 61%, 62%, 63%, 64%, 65%, 66%, 67%, 68%, 69%, 70%, 71%, 72%, 73%, 74%, 75%, 76%, 77%, 78%, 79%, 80%, 81%, 82%, 83%, 84%, 85%, 86%, 87%, 88%, 89%, 90%, 91%, 92%, 93%, 94%, 95%, 96%, 97%, 98%, 99%, or 100% sequence identity to any amino acid sequence according to SEQ ID NOs: 170-220. In some embodiments, the V_{L}-CDR2 comprises an amino acid sequence having at least 60%, 61%, 62%, 63%, 64%, 65%, 66%, 67%, 68%, 69%, 70%, 71%, 72%, 73%, 74%, 75%, 76%, 77%, 78%, 79%, 80%, 81%, 82%, 83%, 84%, 85%, 86%, 87%, 88%, 89%, 90%, 91%, 92%, 93%, 94%, 95%, 96%, 97%, 98%, 99%, or 100% sequence identity to any amino acid sequence according to SEQ ID NOs: 221-247. In some embodiments, the V_{L}-CDR3 comprises an amino acid sequence having at least 60%, 61%, 62%, 63%, 64%, 65%, 66%, 67%, 68%, 69%, 70%, 71%, 72%, 73%, 74%, 75%, 76%, 77%, 78%, 79%, 80%, 81%, 82%, 83%, 84%, 85%, 86%, 87%, 88%, 89%, 90%, 91%, 92%, 93%, 94%, 95%, 96%, 97%, 98%, 99%, or 100% sequence identity to any amino acid sequence according to SEQ ID NOs: 248-296. In some embodiments, the V_{H}-CDR1 comprises an amino acid sequence having at least 60%, 61%, 62%, 63%, 64%, 65%, 66%, 67%, 68%, 69%, 70%, 71%, 72%, 73%, 74%, 75%, 76%, 77%, 78%, 79%, 80%, 81%, 82%, 83%, 84%, 85%, 86%, 87%, 88%, 89%, 90%, 91%, 92%, 93%, 94%, 95%, 96%, 97%, 98%, 99%, or 100% sequence identity to any amino acid sequence according to SEQ ID NOs: 27-70. In some embodiments, the V_{H}-CDR2 comprises an amino acid sequence having at least 60%, 61%, 62%, 63%, 64%, 65%, 66%, 67%, 68%, 69%, 70%, 71%, 72%, 73%, 74%, 75%, 76%, 77%, 78%, 79%, 80%, 81%, 82%, 83%, 84%, 85%, 86%, 87%, 88%, 89%, 90%, 91%, 92%, 93%, 94%, 95%, 96%, 97%, 98%, 99%, or 100% sequence identity to any amino acid sequence according to SEQ ID NOs: 71-111, 826. In some embodiments, the V_{H}-CDR3 comprises an amino acid sequence having at least 60%, 61%, 62%, 63%, 64%, 65%, 66%, 67%, 68%, 69%, 70%, 71%, 72%, 73%, 74%, 75%, 76%, 77%, 78%, 79%, 80%, 81%, 82%, 83%, 84%, 85%, 86%, 87%, 88%, 89%, 90%, 91%, 92%, 93%, 94%, 95%, 96%, 97%, 98%, 99%, or 100% sequence identity to any amino acid sequence according to SEQ ID NOs: 112-169, 827. In some embodiments, the antibodies comprise one or more sequences having at least 80%, 81%, 82%, 83%, 84%, 85%, 86%, 87%, 88%, 89%, 90%, 91%, 92%, 93%, 94%, 95%, 96%, 97%, 98%, 99%, or 100% identity to a VL sequence, a VH sequence, a VL/VH pairing, and/or VL-CDR1, VL-CDR2, VL-CDR3, VH-CDR1, VH-CDR2, VH-CDR3 (including 1, 2, 3, 4, or 5 amino acid substitutions of any one or more of these CDRs) set from the heavy chain and light chain sequences as depicted in FIG. 18.

[0114] In some embodiments, antibodies or binding fragments thereof are provided. In some embodiments, the antibodies or binding fragments thereof are anti-Gal3 antibodies or binding fragments thereof. In some embodiments, the anti-Gal3 antibodies or binding fragments thereof comprise a light chain variable region comprising a VL-CDR1, a VL-CDR2, and a V_{L}-CDR3. In some embodiments, the anti-Gal3 antibodies or binding fragments thereof comprises a heavy chain variable region comprising a V_{H}-CDR1, a V_{H}-CDR2, and a V_{H}-CDR3. In some embodiments, the V_{L}-CDR1 comprises an amino acid sequence having at least 60%, 61%, 62%, 63%, 64%, 65%, 66%, 67%, 68%, 69%, 70%, 71%, 72%, 73%, 74%, 75%, 76%, 77%, 78%, 79%, 80%, 81%, 82%, 83%, 84%, 85%, 86%, 87%, 88%, 89%, 90%, 91%, 92%, 93%, 94%, 95%, 96%, 97%, 98%, 99%, or 100% sequence similarity to any amino acid sequence according to SEQ ID NOs: 170-220. In some embodiments, the V_{L}-CDR2 comprises an amino acid sequence having at least 60%, 61%, 62%, 63%, 64%, 65%, 66%, 67%, 68%, 69%, 70%, 71%, 72%, 73%, 74%, 75%, 76%, 77%, 78%, 79%, 80%, 81%, 82%, 83%, 84%, 85%, 86%, 87%, 88%, 89%, 90%, 91%, 92%, 93%, 94%, 95%, 96%, 97%, 98%, 99%, or 100% sequence similarity to any amino acid sequence according to SEQ ID NOs: 221-247. In some embodiments, the V_{L}-CDR3 comprises an amino acid sequence having at least 60%, 61%, 62%, 63%, 64%, 65%, 66%, 67%, 68%, 69%, 70%, 71%, 72%, 73%, 74%, 75%, 76%, 77%, 78%, 79%, 80%, 81%, 82%, 83%, 84%, 85%, 86%, 87%, 88%, 89%, 90%, 91%, 92%, 93%, 94%, 95%, 96%, 97%, 98%, 99%, or 100% sequence similarity to any amino acid sequence according to SEQ ID NOs: 248-296. In some embodiments, the V_{H}-CDR1 comprises an amino acid sequence having at least 60%, 61%, 62%, 63%, 64%, 65%, 66%, 67%, 68%, 69%, 70%, 71%, 72%, 73%, 74%, 75%, 76%, 77%, 78%, 79%, 80%, 81%, 82%, 83%, 84%, 85%, 86%, 87%, 88%, 89%, 90%, 91%, 92%, 93%, 94%, 95%, 96%, 97%, 98%, 99%, or 100% sequence similarity to any amino acid sequence according to SEQ ID NOs: 27-70. In some embodiments, the V_{H}-CDR2 comprises an amino acid sequence having at least 60%, 61%, 62%, 63%, 64%, 65%, 66%, 67%, 68%, 69%, 70%, 71%, 72%, 73%, 74%, 75%, 76%, 77%, 78%, 79%, 80%, 81%, 82%, 83%, 84%, 85%, 86%, 87%, 88%, 89%, 90%, 91%, 92%, 93%, 94%, 95%, 96%, 97%, 98%, 99%, or 100% sequence similarity to any amino acid sequence according to SEQ ID NOs: 71-111, 826. In some embodiments, the V_{H}-CDR3 comprises an amino acid sequence having at least 60%, 61%, 62%, 63%, 64%, 65%, 66%, 67%, 68%, 69%, 70%, 71%, 72%, 73%, 74%, 75%, 76%, 77%, 78%, 79%, 80%, 81%, 82%, 83%, 84%, 85%, 86%, 87%, 88%, 89%, 90%, 91%, 92%, 93%, 94%, 95%, 96%, 97%, 98%, 99%, or 100% sequence similarity to any amino acid sequence according to SEQ ID NOs: 112-169, 827. In some embodiments, the antibodies comprise one or more sequences having at least 80%, 81%, 82%, 83%, 84%, 85%, 86%, 87%, 88%, 89%, 90%, 91%, 92%, 93%, 94%, 95%, 96%, 97%, 98%, 99%, or 100% similar to a VL sequence, a VH sequence, a VL/VH pairing, and/or V_{L}-CDR1, V_{L}-CDR2, V_{L}-CDR3, V_{H}-CDR1, V_{H}-CDR2, V_{H}-CDR3 (including 1, 2, 3, 4, or 5 amino acid substitutions of any one or more of these CDRs) set from the heavy chain and light chain sequences as depicted in FIG. 18.

[0115] In some embodiments, antibodies or binding fragments thereof are provided. In some embodiments, the antibodies or binding fragments thereof are anti-Gal3 antibodies or binding fragments thereof. In some embodiments, the anti-Gal3 antibodies or binding fragments thereof comprise a light chain variable region comprising a V_{L}-CDR1, a V_{L}-CDR2, and a V_{L}-CDR3. In some embodiments, the anti-Gal3 antibodies or binding fragments thereof comprises a heavy chain variable region comprising a V_{H}-CDR1, a V_{H}-CDR2, and a V_{H}-CDR3. In some embodiments, the V_{L}-CDR1 comprises an amino acid sequence having at least 0, 1, 2, 3, 4, 5, or 6 substitutions relative to any amino acid sequence according to SEQ ID NOs: 170-220. In some embodiments, the V_{L}-CDR2 comprises an amino acid sequence having at least 0, 1, 2, 3, 4, 5, or 6 substitutions relative to any amino acid sequence according to SEQ ID NOs: 221-247. In some embodiments, the V_{L}-CDR3 comprises an amino acid sequence having at least 0, 1, 2, 3, 4, 5, or 6 substitutions relative to any amino acid sequence according to SEQ ID NOs: 248-296. In some embodiments, the V_{H}-CDR1 comprises an amino acid sequence having at least 0, 1, 2, 3, 4, 5, or 6 substitutions relative to any amino acid sequence according to SEQ ID NOs: 27-70. In some embodiments, the V_{H}-CDR2 comprises an amino acid sequence having at least 0, 1, 2, 3, 4, 5, or 6 substitutions relative to any amino acid sequence according to SEQ ID NOs: 71-111, 826. In some embodiments, the V_{H}-CDR3 comprises an amino acid sequence having at least 0, 1, 2, 3, 4, 5, or 6 substitutions relative to any amino acid sequence according to SEQ ID NOs: 112-169, 827.

[0116] In some embodiments, the antibody or binding fragment thereof comprises a combination of a V_{L}-CDR1, a V_{L}-CDR2, a V_{L}-CDR3, a V_{H}-CDR1, a V_{H}-CDR2, and a V_{H}-CDR3 as illustrated in FIG. 14.

[0117] In some embodiments, the antibody or binding fragment thereof comprises a combination of a V_{L}-CDR1, a V_{L}-CDR2, a V_{L}-CDR3, a V_{H}-CDR1, a V_{H}-CDR2, and a V_{H}-CDR3 where one or more of these CDRs is defined by a consensus sequence. The consensus sequences provided herein have been derived from the alignments of CDRs depicted in FIG. 33A-B. However, it is envisioned that alternative alignments may be done (e.g. using global or local alignment, or with different algorithms, such as Hidden Markov Models, seeded guide trees, Needleman-Wunsch algorithm, or Smith-Waterman algorithm) and as such, alternative consensus sequences can be derived.

[0118] In some embodiments, the V_{L}-CDR1 is defined by the formula X₁X₂X₃X₄X₅X₆X₇X₈X₉X₁₀X₁₁X₁₂X₁₃X₁₄X₁₅X₁₆X₁₇, where X₁ is no amino acid or R; X₂ is no amino acid or S; X₃ is no amino acid, S, or T; X₄ is no amino acid, E, G, K, Q, or R; X₅ is no amino acid, A, D, G, I, N, or S; X₆ is no amino acid, I, L, or V; X₇ is no amino acid, F, L, S, or V; X₈ is no amino acid, D, E, H, N, S, T, or Y; X₉ is no amino acid, D, E, I, K, N, R, S, T, or V; X₁₀ is no amino acid, D, H, N, R, S, or Y; X₁₁ is no amino acid, A, G, N, S, T, or V; X₁₂ is no amino acid, A, I, K, N, Q, T, V, or Y; X₁₃ is no amino acid, D, G, H, K, N, S, T, or Y; X₁₄ is no amino acid, C, F, I, N, S, T, V, or Y; X₁₅ is no amino acid, D, L, N, W, or Y; X₁₆ is no amino acid, N, or D; X₁₇ is no amino acid or D. In some embodiments, the V_{L}-CDR1 comprises a sequence having at least 80%, 81%, 82%, 83%, 84%, 85%, 86%, 87%, 88%, 89%, 90%, 91%, 92%, 93%, 94%, 95%, 96%, 97%, 98%, 99%, or 100% identity to this consensus sequence. In some embodiments, the V_{L}-CDR1 comprises a sequence having 0, 1, 2, 3, 4, 5, or 6 substitutions from this consensus sequence.

[0119] In some embodiments, the V_{L}-CDR2 is defined by the formula X₁X₂X₃X₄X₅X₆X₇X₈, where X₁ is no amino acid, K, L, N, Q, or R; X₂ is no amino acid, A, L, M, or V; X₃ is no amino acid, C, K, or S; X₄ is no amino acid or T; X₅ is no amino acid, A, E, F, G, H, K, Q, R, S, W, or Y; X₆ is no amino acid, A, G, or T; X₇ is no amino acid, I, K, N, S, or T; X₈ is no amino acid, N, or S. In some embodiments, the V_{L}-CDR2 comprises a sequence having at least 80%, 81%, 82%, 83%, 84%, 85%, 86%, 87%, 88%, 89%, 90%, 91%, 92%, 93%, 94%, 95%, 96%, 97%, 98%, 99%, or 100% identity to this consensus sequence. In some embodiments, the V_{L}-CDR2 comprises a sequence having 0, 1, 2, 3, 4, 5, or 6 substitutions from this consensus sequence.

[0120] In some embodiments, the V_{L}-CDR3 is defined by the formula X₁X₂X₃X₄X₅X₆X₇X₈X₉X₁₀, where X₁ is no amino acid, A, E, F, H, L, M, Q, S, V, or W; X₂ is A, H, or Q; X₃ is D, F, G, H, L, M, N, Q, S, T, W, or Y; X₄ is no amino acid or W; X₅ is A, D, I, K, L, N, Q, R, S, T, V, or Y; X₆ is D, E, H, I, K, L, N, Q, S, or T; X₇ is D, F, K, L, N, P, S, T, V, W, or Y; X₈ is H, P, or S; X₉ is F, L, P, Q, R, T, W, or Y; X₁₀ is no amino acid, T, or V. In some embodiments, the V_{L}-CDR3 comprises a sequence having at least 80%, 81%, 82%, 83%, 84%, 85%, 86%, 87%, 88%, 89%, 90%, 91%, 92%, 93%, 94%, 95%, 96%, 97%, 98%, 99%, or 100% identity to this consensus sequence. In some embodiments, the V_{L}-CDR3 comprises a sequence having 0, 1, 2, 3, 4, 5, or 6 substitutions from this consensus sequence.

[0121] In some embodiments, the V_{H}-CDR1 is defined by the formula X₁X₂X₃X₄X₅X₆X₇X₈X₉X₁₀, where X₁ is E, G, or R; X₂ is F, N, or Y; X₃ is A, I, K, N, S, or T; X₄ is F, I, or L; X₅ is I, K, N, R, S, or T; X₆ is D, G, I, N, S, or T; X₇ is F, G, H, S, or Y; X₈ is no amino acid, A, D, G, I, M, N, T, V, W, or Y; X₉ is no amino acid, M, or Y; X₁₀ is no amino acid or G; In some embodiments, the V_{H}-CDR1 comprises a sequence having at least 80%, 81%, 82%, 83%, 84%, 85%, 86%, 87%, 88%, 89%, 90%, 91%, 92%, 93%, 94%, 95%, 96%, 97%, 98%, 99%, or 100% identity to this consensus sequence. In some embodiments, the V_{H}-CDR1 comprises a sequence having 0, 1, 2, 3, 4, 5, or 6 substitutions from this consensus sequence.

[0122] In some embodiments, the V_{H}-CDR2 is defined by the formula X₁X₂X₃X₄X₅X₆X₇X₈X₉X₁₀, where X₁ is no amino acid, I, or L; X₂ is no amino acid or R; X₃ is no amino acid, F, I, L, or V; X₄ is A, D, F, H, K, L, N, S, W, or Y; X₅ is A, D, P, S, T, W, or Y; X₆ is D, E, G, H, K, N, S, V, or Y; X₇ is D, E, G, N, S, or T; X₈ is D, G, I, K, N, Q, R, S, V, or Y; X₉ is A, D, E, G, I, K, N, P, S, T, V, or Y; X₁₀ is no amino acid, I, P, S, or T. In some embodiments, the V_{H}-CDR2 comprises a sequence having at least 80%, 81%, 82%, 83%, 84%, 85%, 86%, 87%, 88%, 89%, 90%, 91%, 92%, 93%, 94%, 95%, 96%, 97%, 98%, 99%, or 100% identity to this consensus sequence. In some embodiments, the V_{H}-CDR2 comprises a sequence having 0, 1, 2, 3, 4, 5, or 6 substitutions from this consensus sequence.

[0123] In some embodiments, the V_{H}-CDR3 is defined by the formula X₁X₂X₃X₄X₅X₆X₇X₈X₉X₁₀X₁₁X₁₂X₁₃X₁₄X₁₅X₁₆X₁₇X₁₈X₁₉X₂₀X₂₁X₂₂X₂₃X₂₄X₂₅, where X₁ is no amino acid or A; X₂ is no amino acid, A, R, or Y; X₃ is no amino acid, A, F, H, K, L, R, S, or V; X₄ is no amino acid, A, D, K, N, R, S, or T; X₅ is no amino acid, A, D, G, H, I, L, N, P, R, S, T, V, or Y; X₆ is no amino acid, A, D, G, H, K, N, P, Q, R, S, or Y; X₇ is no amino acid, D, F, G, H, P, R, S, W, or Y; X₈ is no amino acid, A, D, E, G, I, R, or S; X₉ is no amino acid, A, C, D, E, F, G, I, N, R, S, T, V, or Y; X₁₀ is no amino acid, A, D, M, P, R, S, T, V, or Y; X₁₁ is no amino acid, A, D, E, F, L, T, V, or Y; X₁₂ is no amino acid, A, G, L, M, R, or T; X₁₃ is no amino acid, A, D, E, F, G, R, S, T, or V; X₁₄ is no amino acid, A, D, G, L, P, Q, R, S, T, V, or Y; X₁₅ is no amino acid, A, D, G, N, S, V, W, or Y; X₁₆ is no amino acid, A, D, E, F, L, P, T, V, W, or Y; X₁₇ is no amino acid, F, I, L, M, R, or Y; X₁₈ is no amino acid, A, D, G, N, or T; X₁₉ is no amino acid, F, N, S, T, V, or Y; X₂₀ is no amino acid or L; X₂₁ is no amino acid or A; X₂₂ is no amino acid or W; X₂₃ is no amino acid or F; X₂₄ is no amino acid or A; X₂₅ is no amino acid or Y. In some embodiments, the V_{H}-CDR3 comprises a sequence having at least 80%, 81%, 82%, 83%, 84%, 85%, 86%, 87%, 88%, 89%, 90%, 91%, 92%, 93%, 94%, 95%, 96%, 97%, 98%, 99%, or 100% identity to this consensus sequence. In some embodiments, the V_{H}-CDR3 comprises a sequence having 0, 1, 2, 3, 4, 5, or 6 substitutions from this consensus sequence.

[0124] In some embodiments, the light chain variable region of the antibody or binding fragment thereof comprises a sequence having at least 80%, 81%, 82%, 83%, 84%, 85%, 86%, 87%, 88%, 89%, 90%, 91%, 92%, 93%, 94%, 95%, 96%, 97%, 98%, or 99% identity to the sequence selected from SEQ ID NOs: 374-447, 823-825. In some embodiments, the light chain variable region of the anti-Gal3 antibody or binding fragment thereof comprises the sequence selected from SEQ ID NOs: 374-447, 823-825. In some embodiments, the heavy chain variable region of the anti-Gal3 antibody or binding fragment thereof comprises a sequence having at least 80%, 81%, 82%, 83%, 84%, 85%, 86%, 87%, 88%, 89%, 90%, 91%, 92%, 93%, 94%, 95%, 96%, 97%, 98%, or 99% identity to the sequence selected from SEQ ID NOs: 297-373, 822, 828. In some embodiments, the heavy chain variable region of the antibody or binding fragment thereof comprises the sequence selected from SEQ ID NOs: 297-373, 822, 828. In some embodiments, the antibodies or binding fragments thereof are anti-Gal3 antibodies or binding fragments thereof.

[0125] In some embodiments, the light chain variable region of the antibody or binding fragment thereof comprises a sequence having at least 80%, 81%, 82%, 83%, 84%, 85%, 86%, 87%, 88%, 89%, 90%, 91%, 92%, 93%, 94%, 95%, 96%, 97%, 98%, or 99% similarity to the sequence selected from SEQ ID NOs: 374-447, 823-825. In some embodiments, the light chain variable region of the anti-Gal3 antibody or binding fragment thereof comprises the sequence selected from SEQ ID NOs: 374-447, 823-825. In some embodiments, the heavy chain variable region of the anti-Gal3 antibody or binding fragment thereof comprises a sequence having at least 80%, 81%, 82%, 83%, 84%, 85%, 86%, 87%, 88%, 89%, 90%, 91%, 92%, 93%, 94%, 95%, 96%, 97%, 98%, or 99% similarity to the sequence selected from SEQ ID NOs: 297-373, 822, 828. In some embodiments, the heavy chain variable region of the anti-Gal3 antibody or binding fragment thereof comprises the sequence selected from SEQ ID NOs: 297-373, 822, 828. In some embodiments, the antibodies or binding fragments thereof are anti-Gal3 antibodies or binding fragments thereof. In some embodiments, the antibodies comprise one or more sequences having at least 80%, 81%, 82%, 83%, 84%, 85%, 86%, 87%, 88%, 89%, 90%, 91%, 92%, 93%, 94%, 95%, 96%, 97%, 98%, 99%, or 100% identity to a VL sequence, a VH sequence, a VL/VH pairing, and/or V_{L}-CDR1, V_{L}-CDR2, V_{L}-CDR3, V_{H}-CDR1, V_{H}-CDR2, V_{H}-CDR3 (including 1, 2, 3, 4, or 5 amino acid substitutions of any one or more of these CDRs) set from the heavy chain and light chain sequences as depicted in FIG. 18.

[0126] In some embodiments, antibodies or binding fragments thereof are provided. In some embodiments, the antibodies are anti-Gal3 antibodies or binding fragments thereof. In some embodiments, the anti-Gal3 antibodies or binding fragments thereof comprise a light chain variable region comprising a V_{L}-CDR1, a V_{L}-CDR2, and a V_{L}-CDR3. In some embodiments, the anti-Gal3 antibodies or binding fragments thereof comprises a heavy chain variable region comprising a V_{H}-CDR1, a V_{H}-CDR2, and a V_{H}-CDR3. In some embodiments, the V_{L}-CDR1 comprises one of the amino acid sequences of SEQ ID NOs: 170-220, the V_{L}-CDR2 comprises one of the amino acid sequences of SEQ ID NOs: 211-247, the V_{L}-CDR3 comprises one of the amino acid sequences of SEQ ID NOs: 248-296, the V_{H}-CDR1 comprises one of the amino acid sequences of SEQ ID NOs: 27-70, the V_{H}-CDR2 comprises one of the amino acid sequences of SEQ ID NOs: 71-111, 826, and the V_{H}-CDR3 comprises one of the amino acid sequences of SEQ ID NO: 112-169, 827, the light chain variable region has a sequence having at least 80%, 81%, 82%, 83%, 84%, 85%, 86%, 87%, 88%, 89%, 90%, 91%, 92%, 93%, 94%, 95%, 96%, 97%, 98%, 99%, or 100% identity to one of the amino acid sequences of SEQ ID NOs: 374-447, 823-825, and the heavy chain variable region has a sequence having at least 80%, 81%, 82%, 83%, 84%, 85%, 86%, 87%, 88%, 89%, 90%, 91%, 92%, 93%, 94%, 95%, 96%, 97%, 98%, 99%, or 100% identity to one of the amino acid sequences of SEQ ID NOs: 297-373, 822, 828.

[0127] In some embodiments, the antibody or binding fragment thereof comprises a light chain, wherein the light chain comprises a sequence having at least 80%, 81%, 82%, 83%, 84%, 85%, 86%, 87%, 88%, 89%, 90%, 91%, 92%, 93%, 94%, 95%, 96%, 97%, 98%, or 99% identity to the sequence selected from SEQ ID NOs: 495-538, 830. In some embodiments, the light chain comprises the sequence selected from SEQ ID NOs: 495-538, 830. In some embodiments, the anti-Gal3 antibody or binding fragment thereof comprises a heavy chain, wherein the heavy chain comprises a sequence having at least 80%, 81%, 82%, 83%, 84%, 85%, 86%, 87%, 88%, 89%, 90%, 91%, 92%, 93%, 94%, 95%, 96%, 97%, 98%, or 99% identity to the sequence selected from SEQ ID NOs: 448-494, 829. In some embodiments, the heavy chain comprises the sequence selected from SEQ ID NOs: 448-494, 829. In some embodiments, the antibodies or binding fragments thereof are anti-Gal3 antibodies or binding fragments thereof.

[0128] In some embodiments, the antibody or binding fragment thereof comprises a light chain, wherein the light chain comprises a sequence having at least 80%, 81%, 82%, 83%, 84%, 85%, 86%, 87%, 88%, 89%, 90%, 91%, 92%, 93%, 94%, 95%, 96%, 97%, 98%, or 99% similarity to the sequence selected from SEQ ID NOs: 495-538, 830. In some embodiments, the light chain comprises the sequence selected from SEQ ID NOs: 495-538, 830. In some embodiments, the anti-Gal3 antibody or binding fragment thereof comprises a heavy chain, wherein the heavy chain comprises a sequence having at least 80%, 81%, 82%, 83%, 84%, 85%, 86%, 87%, 88%, 89%, 90%, 91%, 92%, 93%, 94%, 95%, 96%, 97%, 98%, or 99% similarity to the sequence selected from SEQ ID NOs: 448-494, 829. In some embodiments, the heavy chain comprises the sequence selected from SEQ ID NOs: 448-494, 829. In some embodiments, the antibodies or binding fragments thereof are anti-Gal3 antibodies or binding fragments thereof.

[0129] In some embodiments, antibodies or binding fragments thereof are provided. In some embodiments, the antibodies are anti-Gal3 antibodies or binding fragments thereof. In some embodiments, the anti-Gal3 antibodies or binding fragments thereof comprise a light chain variable region comprising a V_{L}-CDR1, a V_{L}-CDR2, and a V_{L}-CDR3. In some embodiments, the anti-Gal3 antibodies or binding fragments thereof comprises a heavy chain variable region comprising a V_{H}-CDR1, a V_{H}-CDR2, and a V_{H}-CDR3. In some embodiments, the V_{L}-CDR1 comprises one of the amino acid sequences of SEQ ID NOs: 170-220, the V_{L}-CDR2 comprises one of the amino acid sequences of SEQ ID NOs: 211-247, the V_{L}-CDR3 comprises one of the amino acid sequences of SEQ ID NOs: 248-296, the V_{H}-CDR1 comprises one of the amino acid sequences of SEQ ID NOs: 27-70, the V_{H}-CDR2 comprises one of the amino acid sequences of SEQ ID NOs: 71-111, 826, and the V_{H}-CDR3 comprises one of the amino acid sequences of SEQ ID NO: 112-169, 827, the light chain has a sequence having at least 80%, 81%, 82%, 83%, 84%, 85%, 86%, 87%, 88%, 89%, 90%, 91%, 92%, 93%, 94%, 95%, 96%, 97%, 98%, 99%, or 100% identity to one of the amino acid sequences of SEQ ID NOs: 495-538, 830, and the heavy chain has a sequence having at least 80%, 81%, 82%, 83%, 84%, 85%, 86%, 87%, 88%, 89%, 90%, 91%, 92%, 93%, 94%, 95%, 96%, 97%, 98%, 99%, or 100% identity to one of the amino acid sequences of SEQ ID NOs: 448-494, 829.

[0130] In some embodiments, antibodies or binding fragments thereof are provided. In some embodiments, the antibodies are anti-Gal3 antibodies or binding fragments thereof. In some embodiments, the anti-Gal3 antibodies or binding fragments thereof comprise a light chain variable region and a heavy chain variable region. In some embodiments, the light chain variable region is paired with an IgG4 kappa chain constant domain. In some embodiments, the IgG4 kappa chain constant domain comprises a sequence having at least 80%, 81%, 82%, 83%, 84%, 85%, 86%, 87%, 88%, 89%, 90%, 91%, 92%, 93%, 94%, 95%, 96%, 97%, 98%, 99%, or 100% identity to SEQ ID NO: 833. In some embodiments, the heavy chain variable region is paired with an IgG4 heavy chain constant domain or an IgG2 heavy chain constant domain. In some embodiments, the IgG4 heavy chain constant domain or IgG2 heavy chain constant domain are human or murine. In some embodiments, the IgG4 heavy chain constant domain comprises a sequence having at least 80%, 81%, 82%, 83%, 84%, 85%, 86%, 87%, 88%, 89%, 90%, 91%, 92%, 93%, 94%, 95%, 96%, 97%, 98%, 99%, or 100% identity to SEQ ID NO: 832. In some embodiments, the IgG4 heavy chain constant domain is an S228P mutant. In some embodiments, the IgG2 heavy chain constant domain comprises a sequence having at least 80%, 81%, 82%, 83%, 84%, 85%, 86%, 87%, 88%, 89%, 90%, 91%, 92%, 93%, 94%, 95%, 96%, 97%, 98%, 99%, or 100% identity to SEQ ID NO: 838 or SEQ ID NO: 839. In some embodiments, the IgG2 heavy chain constant domain is a LALAPG or a LALA mutant. In some embodiments, the light chain variable region and/or heavy chain variable region may be selected from those depicted in FIGS. 15 and 16 and/or the combinations of light chain variable region and heavy chain variable region as depicted in FIG. 17. In some embodiments, the light chain variable region and/or heavy chain variable regions comprise one or more CDRs depicted in FIGS. 8-13 and/or the combinations of CDRs depicted in FIG. 14.

[0131] In some embodiments, the antibody or binding fragment thereof is selected from the group consisting of: TB001, TB006, 12G5.D7, 13A12.2E5, 14H10.2C9, 15F10.2D6, 19B5.2E6, 20D11.2C6, 20H5.A3, 23H9.2E4, 2D10.2B2, 3B11.2G2, 7D8.2D8, mIMT001, 4A11.2B5, 4A11.H1L1, 4A11.H4L2, 4G2.2G6, 6B3.2D3, 6H6.2D6, 9H2.2H10, 13G4.2F8, 13H12.2F8, 15G7.2A7, 19D9.2E5, 23B10.2B12, 24D12.2H9, F846C.1B2, F846C.1F5, F846C.1H12, F846C.1H5, F846C.2H3, F846TC.14A2, F846TC.14E4, F846TC.16B5, F846TC.7F10, F847C.10B9, F847C.11B1, F847C.12F12, F847C.26F5, F847C.4B10, F849C.8D10, F849C.8H3, 846.2B11, 846.4D5, 846T.1H2, 847.14H4, 846.2D4, 846.2F11, 846T.10B1, 846T.2E3, 846T.4C9, 846T.4E11, 846T.4F5, 846T.8D1, 847.10C9, 847.11D6, 847.15D12, 847.15F9, 847.15H11, 847.20H7, 847.21B11, 847.27B9, 847.28D1, 847.2B8, 847.3B3, 849.1D2, 849.2D7, 849.2F12, 849.4B2, 849.4F12, 849.4F2, 849.5C2, 849.8D12, F847C.21H6, 849.5H1, 847.23F11, 847.16D10, 847.13E2-mH0mL1, 847.13E2-mH0mL2, 847.12C4, 847.4D3, 2D10-VH0-VL0, or binding fragment thereof.

[0132] In some embodiments, the antibody or binding fragment thereof comprises a sequence (e.g. CDR, VL, VH, LC, HC) having at least 80%, 81%, 82%, 83%, 84%, 85%, 86%, 87%, 88%, 89%, 90%, 91%, 92%, 93%, 94%, 95%, 96%, 97%, 98%, 99%, or 100% sequence identity to a sequence of TB001, TB006, 12G5.D7, 13A12.2E5, 14H10.2C9, 15F10.2D6, 19B5.2E6, 20D11.2C6, 20H5.A3, 23H9.2E4, 2D10.2B2, 3B11.2G2, 7D8.2D8, mIMT001, 4A11.2B5, 4A11.H1L1, 4A11.H4L2, 4G2.2G6, 6B3.2D3, 6H6.2D6, 9H2.2H10, 13G4.2F8, 13H12.2F8, 15G7.2A7, 19D9.2E5, 23B10.2B12, 24D12.2H9, F846C.1B2, F846C.1F5, F846C.1H12, F846C.1H5, F846C.2H3, F846TC.14A2, F846TC.14E4, F846TC.16B5, F846TC.7F10, F847C.10B9, F847C.11B1, F847C.12F12, F847C.26F5, F847C.4B10, F849C.8D10, F849C.8H3, 846.2B11, 846.4D5, 846T.1H2, 847.14H4, 846.2D4, 846.2F11, 846T.10B1, 846T.2E3, 846T.4C9, 846T.4E11, 846T.4F5, 846T.8D1, 847.10C9, 847.11D6, 847.15D12, 847.15F9, 847.15H11, 847.20H7, 847.21B11, 847.27B9, 847.28D1, 847.2B8, 847.3B3, 849.1D2, 849.2D7, 849.2F12, 849.4B2, 849.4F12, 849.4F2, 849.5C2, 849.8D12, F847C.21H6, 849.5H1, 847.23F11, 847.16D10, 847.13E2-mH0mL1, 847.13E2-mH0mL2, 847.12C4, 847.4D3, or 2D10-VH0-VL0.

[0133] In some embodiments, the antibody or binding fragment thereof comprises a sequence (e.g. CDR, VL, VH, LC, HC) having at least 80%, 81%, 82%, 83%, 84%, 85%, 86%, 87%, 88%, 89%, 90%, 91%, 92%, 93%, 94%, 95%, 96%, 97%, 98%, 99%, or 100% sequence similarity to a sequence of TB001, TB006, 12G5.D7, 13A12.2E5, 14H10.2C9, 15F10.2D6, 19B5.2E6, 20D11.2C6, 20H5.A3, 23H9.2E4, 2D10.2B2, 3B11.2G2, 7D8.2D8, mIMT001, 4A11.2B5, 4A11.H1L1, 4A11.H4L2, 4G2.2G6, 6B3.2D3, 6H6.2D6, 9H2.2H10, 13G4.2F8, 13H12.2F8, 15G7.2A7, 19D9.2E5, 23B10.2B12, 24D12.2H9, F846C.1B2, F846C.1F5, F846C.1H12, F846C.1H5, F846C.2H3, F846TC.14A2, F846TC.14E4, F846TC.16B5, F846TC.7F10, F847C.10B9, F847C.11B1, F847C.12F12, F847C.26F5, F847C.4B10, F849C.8D10, F849C.8H3, 846.2B11, 846.4D5, 846T.1H2, 847.14H4, 846.2D4, 846.2F11, 846T.10B1, 846T.2E3, 846T.4C9, 846T.4E11, 846T.4F5, 846T.8D1, 847.10C9, 847.11D6, 847.15D12, 847.15F9, 847.15H11, 847.20H7, 847.21B11, 847.27B9, 847.28D1, 847.2B8, 847.3B3, 849.1D2, 849.2D7, 849.2F12, 849.4B2, 849.4F12, 849.4F2, 849.5C2, 849.8D12, F847C.21H6, 849.5H1, 847.23F11, 847.16D10, 847.13E2-mH0mL1, 847.13E2-mH0mL2, 847.12C4, 847.4D3, or 2D10-VH0-VL0.

[0134] In some embodiments, antibodies or binding fragments thereof are provided. In some embodiments, the antibodies or binding fragments thereof are anti-Gal3 antibodies or binding fragments thereof. In some embodiments, the anti-Gal3 antibodies or binding fragments thereof comprise a light chain variable region comprising a V_{L}-CDR1, a V_{L}-CDR2, and a V_{L}-CDR3. In some embodiments, the anti-Gal3 antibodies or binding fragments thereof comprises a heavy chain variable region comprising a V_{H}-CDR1, a V_{H}-CDR2, and a V_{H}-CDR3. In some embodiments, the V_{L}-CDR1 comprises an amino acid sequence having at least 60%, 61%, 62%, 63%, 64%, 65%, 66%, 67%, 68%, 69%, 70%, 71%, 72%, 73%, 74%, 75%, 76%, 77%, 78%, 79%, 80%, 81%, 82%, 83%, 84%, 85%, 86%, 87%, 88%, 89%, 90%, 91%, 92%, 93%, 94%, 95%, 96%, 97%, 98%, 99%, or 100% sequence identity to SEQ ID NO: 170. In some embodiments, the V_{L}-CDR2 comprises an amino acid sequence having at least 60%, 61%, 62%, 63%, 64%, 65%, 66%, 67%, 68%, 69%, 70%, 71%, 72%, 73%, 74%, 75%, 76%, 77%, 78%, 79%, 80%, 81%, 82%, 83%, 84%, 85%, 86%, 87%, 88%, 89%, 90%, 91%, 92%, 93%, 94%, 95%, 96%, 97%, 98%, 99%, or 100% sequence identity to SEQ ID NO: 221. In some embodiments, the V_{L}-CDR3 comprises an amino acid sequence having at least 60%, 61%, 62%, 63%, 64%, 65%, 66%, 67%, 68%, 69%, 70%, 71%, 72%, 73%, 74%, 75%, 76%, 77%, 78%, 79%, 80%, 81%, 82%, 83%, 84%, 85%, 86%, 87%, 88%, 89%, 90%, 91%, 92%, 93%, 94%, 95%, 96%, 97%, 98%, 99%, or 100% sequence identity to SEQ ID NO: 248. In some embodiments, the V_{H}-CDR1 comprises an amino acid sequence having at least 60%, 61%, 62%, 63%, 64%, 65%, 66%, 67%, 68%, 69%, 70%, 71%, 72%, 73%, 74%, 75%, 76%, 77%, 78%, 79%, 80%, 81%, 82%, 83%, 84%, 85%, 86%, 87%, 88%, 89%, 90%, 91%, 92%, 93%, 94%, 95%, 96%, 97%, 98%, 99%, or 100% sequence identity to SEQ ID NO: 27. In some embodiments, the V_{H}-CDR2 comprises an amino acid sequence having at least 60%, 61%, 62%, 63%, 64%, 65%, 66%, 67%, 68%, 69%, 70%, 71%, 72%, 73%, 74%, 75%, 76%, 77%, 78%, 79%, 80%, 81%, 82%, 83%, 84%, 85%, 86%, 87%, 88%, 89%, 90%, 91%, 92%, 93%, 94%, 95%, 96%, 97%, 98%, 99%, or 100% sequence identity to SEQ ID NO: 71. In some embodiments, the V_{H}-CDR3 comprises an amino acid sequence having at least 60%, 61%, 62%, 63%, 64%, 65%, 66%, 67%, 68%, 69%, 70%, 71%, 72%, 73%, 74%, 75%, 76%, 77%, 78%, 79%, 80%, 81%, 82%, 83%, 84%, 85%, 86%, 87%, 88%, 89%, 90%, 91%, 92%, 93%, 94%, 95%, 96%, 97%, 98%, 99%, or 100% sequence identity to SEQ ID NO: 112.

[0135] In some embodiments, antibodies or binding fragments thereof are provided. In some embodiments, the antibodies or binding fragments thereof are anti-Gal3 antibodies or binding fragments thereof. In some embodiments, the anti-Gal3 antibodies or binding fragments thereof comprise a light chain variable region comprising a V_{L}-CDR1, a V_{L}-CDR2, and a V_{L}-CDR3. In some embodiments, the anti-Gal3 antibodies or binding fragments thereof comprises a heavy chain variable region comprising a V_{H}-CDR1, a V_{H}-CDR2, and a V_{H}-CDR3. In some embodiments, the V_{L}-CDR1 comprises an amino acid sequence having at least 60%, 61%, 62%, 63%, 64%, 65%, 66%, 67%, 68%, 69%, 70%, 71%, 72%, 73%, 74%, 75%, 76%, 77%, 78%, 79%, 80%, 81%, 82%, 83%, 84%, 85%, 86%, 87%, 88%, 89%, 90%, 91%, 92%, 93%, 94%, 95%, 96%, 97%, 98%, 99%, or 100% sequence similarity to SEQ ID NO: 170. In some embodiments, the V_{L}-CDR2 comprises an amino acid sequence having at least 60%, 61%, 62%, 63%, 64%, 65%, 66%, 67%, 68%, 69%, 70%, 71%, 72%, 73%, 74%, 75%, 76%, 77%, 78%, 79%, 80%, 81%, 82%, 83%, 84%, 85%, 86%, 87%, 88%, 89%, 90%, 91%, 92%, 93%, 94%, 95%, 96%, 97%, 98%, 99%, or 100% sequence similarity to SEQ ID NO: 221. In some embodiments, the V_{L}-CDR3 comprises an amino acid sequence having at least 60%, 61%, 62%, 63%, 64%, 65%, 66%, 67%, 68%, 69%, 70%, 71%, 72%, 73%, 74%, 75%, 76%, 77%, 78%, 79%, 80%, 81%, 82%, 83%, 84%, 85%, 86%, 87%, 88%, 89%, 90%, 91%, 92%, 93%, 94%, 95%, 96%, 97%, 98%, 99%, or 100% sequence similarity to SEQ ID NO: 248. In some embodiments, the V_{H}-CDR1 comprises an amino acid sequence having at least 60%, 61%, 62%, 63%, 64%, 65%, 66%, 67%, 68%, 69%, 70%, 71%, 72%, 73%, 74%, 75%, 76%, 77%, 78%, 79%, 80%, 81%, 82%, 83%, 84%, 85%, 86%, 87%, 88%, 89%, 90%, 91%, 92%, 93%, 94%, 95%, 96%, 97%, 98%, 99%, or 100% sequence similarity to SEQ ID NO: 27. In some embodiments, the V_{H}-CDR2 comprises an amino acid sequence having at least 60%, 61%, 62%, 63%, 64%, 65%, 66%, 67%, 68%, 69%, 70%, 71%, 72%, 73%, 74%, 75%, 76%, 77%, 78%, 79%, 80%, 81%, 82%, 83%, 84%, 85%, 86%, 87%, 88%, 89%, 90%, 91%, 92%, 93%, 94%, 95%, 96%, 97%, 98%, 99%, or 100% sequence similarity to SEQ ID NO: 71. In some embodiments, the V_{H}-CDR3 comprises an amino acid sequence having at least 60%, 61%, 62%, 63%, 64%, 65%, 66%, 67%, 68%, 69%, 70%, 71%, 72%, 73%, 74%, 75%, 76%, 77%, 78%, 79%, 80%, 81%, 82%, 83%, 84%, 85%, 86%, 87%, 88%, 89%, 90%, 91%, 92%, 93%, 94%, 95%, 96%, 97%, 98%, 99%, or 100% sequence similarity to SEQ ID NO: 112.

[0136] In some embodiments, antibodies or binding fragments thereof are provided. In some embodiments, the antibodies or binding fragments thereof are anti-Gal3 antibodies or binding fragments thereof. In some embodiments, the anti-Gal3 antibodies or binding fragments thereof comprise a light chain variable region comprising a V_{L}-CDR1, a V_{L}-CDR2, and a V_{L}-CDR3. In some embodiments, the anti-Gal3 antibodies or binding fragments thereof comprises a heavy chain variable region comprising a V_{H}-CDR1, a V_{H}-CDR2, and a V_{H}-CDR3. In some embodiments, the V_{L}-CDR1 comprises an amino acid sequence having at least 0, 1, 2, 3, 4, 5, or 6 substitutions relative to SEQ ID NO: 170. In some embodiments, the V_{L}-CDR2 comprises an amino acid sequence having at least 0, 1, 2, 3, 4, 5, or 6 substitutions relative to SEQ ID NO: 221. In some embodiments, the V_{L}-CDR3 comprises an amino acid sequence having at least 0, 1, 2, 3, 4, 5, or 6 substitutions relative to SEQ ID NO: 248. In some embodiments, the V_{H}-CDR1 comprises an amino acid sequence having at least 0, 1, 2, 3, 4, 5, or 6 substitutions relative to SEQ ID NO: 27. In some embodiments, the V_{H}-CDR2 comprises an amino acid sequence having at least 0, 1, 2, 3, 4, 5, or 6 substitutions relative to SEQ ID NO: 71. In some embodiments, the V_{H}-CDR3 comprises an amino acid sequence having at least 0, 1, 2, 3, 4, 5, or 6 substitutions relative to SEQ ID NO: 112.

[0137] In some embodiments, the light chain variable region of the anti-Gal3 antibody or binding fragment thereof comprises a sequence having at least 80%, 81%, 82%, 83%, 84%, 85%, 86%, 87%, 88%, 89%, 90%, 91%, 92%, 93%, 94%, 95%, 96%, 97%, 98%, or 99% identity to SEQ ID NO: 374. In some embodiments, the light chain variable region of the anti-Gal3 antibody or binding fragment thereof comprises the sequence of SEQ ID NO: 374. In some embodiments, the heavy chain variable region of the anti-Gal3 antibody or binding fragment thereof comprises a sequence having at least 80%, 81%, 82%, 83%, 84%, 85%, 86%, 87%, 88%, 89%, 90%, 91%, 92%, 93%, 94%, 95%, 96%, 97%, 98%, or 99% identity to SEQ ID NO: 297. In some embodiments, the heavy chain variable region of the anti-Gal3 antibody or binding fragment thereof comprises the sequence of SEQ ID NO: 297.

[0138] In some embodiments, the light chain variable region of the anti-Gal3 antibody or binding fragment thereof comprises a sequence having at least 80%, 81%, 82%, 83%, 84%, 85%, 86%, 87%, 88%, 89%, 90%, 91%, 92%, 93%, 94%, 95%, 96%, 97%, 98%, or 99% similarity to SEQ ID NO: 374. In some embodiments, the light chain variable region of the anti-Gal3 antibody or binding fragment thereof comprises the sequence of SEQ ID NO: 374. In some embodiments, the heavy chain variable region of the anti-Gal3 antibody or binding fragment thereof comprises a sequence having at least 80%, 81%, 82%, 83%, 84%, 85%, 86%, 87%, 88%, 89%, 90%, 91%, 92%, 93%, 94%, 95%, 96%, 97%, 98%, or 99% similarity to the sequence of SEQ ID NO: 297. In some embodiments, the heavy chain variable region of the anti-Gal3 antibody or binding fragment thereof comprises the sequence of SEQ ID NO: 297.

[0139] In some embodiments, the anti-Gal3 antibody or binding fragment thereof comprises a light chain, wherein the light chain comprises a sequence having at least 80%, 81%, 82%, 83%, 84%, 85%, 86%, 87%, 88%, 89%, 90%, 91%, 92%, 93%, 94%, 95%, 96%, 97%, 98%, or 99% identity to the sequence of SEQ ID NO: 495. In some embodiments, the light chain comprises the sequence of SEQ ID NO: 495. In some embodiments, the anti-Gal3 antibody or binding fragment thereof comprises a heavy chain, wherein the heavy chain comprises a sequence having at least 80%, 81%, 82%, 83%, 84%, 85%, 86%, 87%, 88%, 89%, 90%, 91%, 92%, 93%, 94%, 95%, 96%, 97%, 98%, or 99% identity to the sequence of SEQ ID NO: 448. In some embodiments, the heavy chain comprises the sequence of SEQ ID NO: 448.

[0140] In some embodiments, the anti-Gal3 antibody or binding fragment thereof comprises a light chain, wherein the light chain comprises a sequence having at least 80%, 81%, 82%, 83%, 84%, 85%, 86%, 87%, 88%, 89%, 90%, 91%, 92%, 93%, 94%, 95%, 96%, 97%, 98%, or 99% similarity to the sequence of SEQ ID NO: 495. In some embodiments, the light chain comprises the sequence of SEQ ID NO: 495. In some embodiments, the anti-Gal3 antibody or binding fragment thereof comprises a heavy chain, wherein the heavy chain comprises a sequence having at least 80%, 81%, 82%, 83%, 84%, 85%, 86%, 87%, 88%, 89%, 90%, 91%, 92%, 93%, 94%, 95%, 96%, 97%, 98%, or 99% similarity to the sequence of SEQ ID NO: 448. In some embodiments, the heavy chain comprises the sequence of SEQ ID NO: 448.

[0141] In some embodiments, the anti-Gal3 antibody or binding fragment thereof binds to specific epitopes within a Gal3 protein. In some embodiments, the anti-Gal3 antibody or binding fragment thereof binds to a specific epitope within a Gal3 protein having an amino acid sequence according to SEQ ID NO: 1-2, provided in FIG. 6.

[0142] In some embodiments, the anti-Gal3 antibody or binding fragment thereof may bind to at least 1, 2, 3, 4, 5, 6, 7, 8, 9, 10, 11, 12, 13, 14, 15, 16, 17, 18, 19, or 20 amino acid residues within a peptide illustrated in FIG. 7 (SEQ ID NOs: 3-26).

[0143] In some embodiments, the anti-Gal3 antibody or binding fragment thereof may bind to at least 1, 2, 3, 4, 5, 6, 7, 8, 9, 10, 11, 12, 13, 14, 15, 16, 17, 18, 19, or 20 amino acid residues within amino acid residues 1-20 of SEQ ID NO: 1-2. In some embodiments, the anti-Gal3 antibody or binding fragment thereof may bind to at least 1, 2, 3, 4, 5, 6, 7, 8, 9, 10, 11, 12, 13, 14, 15, 16, 17, 18, 19, or 20 amino acid residues within amino acid residues 31-50 of SEQ ID NO: 1-2. In some embodiments, the anti-Gal3 antibody or binding fragment thereof may bind to at least 1, 2, 3, 4, 5, 6, 7, 8, 9, 10, 11, 12, 13, 14, 15, 16, 17, 18, 19, or 20 amino acid residues within amino acid residues 51-70 of SEQ ID NO: 1-2. In some embodiments, the anti-Gal3 antibody or binding fragment thereof may bind to at least 1, 2, 3, 4, 5, 6, 7, 8, 9, 10, 11, 12, 13, 14, 15, 16, 17, 18, 19, or 20 amino acid residues within amino acid residues 61-80 of SEQ ID NO: 1-2.

[0144] In some embodiments, the anti-Gal3 antibody or binding fragment thereof may bind to at least 1, 2, 3, 4, 5, 6, 7, 8, 9, 10, 11, 12, 13, 14, 15, 16, 17, 18, 19, or 20 amino acid residues within Peptide 1 (SEQ ID NO: 3), Peptide 4 (SEQ ID NO: 6), Peptide 6 (SEQ ID NO: 8), or Peptide 7 (SEQ ID NO: 9). In some embodiments, the anti-Gal3 antibody or binding fragment thereof may bind to at least 1, 2, 3, 4, 5, 6, 7, 8, 9, 10, 11, 12, 13, 14, 15, 16, 17, 18, 19, or 20amino acid residues within Peptide 1 (SEQ ID NO: 3). In some embodiments, the anti-Gal3 antibody or binding fragment thereof may bind to at least 11, 2, 3, 4, 5, 6, 7, 8, 9, 10, 11, 12, 13, 14, 15, 16, 17, 18, 19, or 20amino acid residues within Peptide 4 (SEQ ID NO: 6). In some embodiments, the anti-Gal3 antibody or binding fragment thereof may bind to at least 1, 2, 3, 4, 5, 6, 7, 8, 9, 10, 11, 12, 13, 14, 15, 16, 17, 18, 19, or 20amino acid residues within Peptide 6 (SEQ ID NO: 8). In some embodiments, the anti-Gal3 antibody or binding fragment thereof may bind to at least 1, 2, 3, 4, 5, 6, 7, 8, 9, 10, 11, 12, 13, 14, 15, 16, 17, 18, 19, or 20amino acid residues within Peptide 7 (SEQ ID NO: 9). In some embodiments, the anti-Gal3 antibody or binding fragment thereof binds to an epitope present within a region of Gal3 defined by Peptide 1 (SEQ ID NO: 3). In some embodiments, the anti-Gal3 antibody or binding fragment thereof binds to an epitope present within a region of Gal3 defined by Peptide 4 (SEQ ID NO: 6). In some embodiments, the anti-Gal3 antibody or binding fragment thereof binds to an epitope present within a region of Gal3 defined by Peptide 6 (SEQ ID NO: 8). In some embodiments, the anti-Gal3 antibody or binding fragment thereof binds to an epitope present within a region of Gal3 defined by Peptide 7 (SEQ ID NO: 9). In some embodiments, the antibody is one that binds to 1, 2, or all 3 of peptides 1, 6, and/or 7.

[0145] In some embodiments, an anti-Gal3 antibody or binding fragment thereof as described herein may bind to the N-terminal domain of Gal3 or a portion thereof. In some embodiments, an anti-Gal3 antibody or binding fragment thereof as described herein may bind to an epitope of Gal3 that includes a motif of GxYPG, where x is the amino acids alanine (A), glycine (G), or valine (V). In some embodiments, an anti-Gal3 antibody or binding fragment thereof as described herein may bind to an epitope of Gal3 that includes two GxYPG motifs separated by three amino acids, where x is A, G, or V.

[0146] In some embodiments, the anti-Gal3 antibody or binding fragment thereof binds to Gal3. In some embodiments, the anti-Gal3 antibody or binding fragment thereof binds to the N-terminus of Gal3, the N-terminal domain of Gal3, or the TRD of Gal3. In some embodiments, the anti-Gal3 antibody or binding fragment thereof does not bind to the N-terminus of Gal3, the N-terminal domain of Gal3, or the TRD of Gal3. In some embodiments, the anti-Gal3 antibody or binding fragment thereof binds to the C-terminus of Gal3, the C-terminal domain of Gal3, or the CRD of Gal3. In some embodiments, the anti-Gal3 antibody or binding fragment thereof does not bind to the C-terminus of Gal3, the C-terminal domain of Gal3, or the CRD of Gal3. In some embodiments, the anti-Gal3 antibody or binding fragment thereof binds to Gal3 isoform 1. In some embodiments, the anti-Gal3 antibody or binding fragment thereof binds to the N-terminus of Gal3 isoform 1, the N-terminal domain of Gal3 isoform 1, amino acids 1-111 of Gal3 isoform 1, the TRD of Gal3 isoform 1, or amino acids 36-109 of Gal3 isoform 1. In some embodiments, the anti-Gal3 antibody or binding fragment thereof does not bind to the N-terminus of Gal3 isoform 1, the N-terminal domain of Gal3 isoform 1, amino acids 1-111 of Gal3, the TRD of Gal3 isoform 1, or amino acids 36-109 of Gal3 isoform 1. In some embodiments, the anti-Gal3 antibody or binding fragment thereof binds to the C-terminus of Gal3 isoform 1, the C-terminal domain of Gal3 isoform 1, amino acids 112-250 of Gal3, or the CRD of Gal3. In some embodiments, the anti-Gal3 antibody or binding fragment thereof does not bind to the C-terminus of Gal3 isoform 1, the C-terminal domain of Gal3 isoform 1, amino acids 112-250 of Gal3 isoform 1, or the CRD of Gal3. In some embodiments, the anti-Gal3 antibody or binding fragment thereof binds to the N-terminus of Gal3 isoform 3, the N-terminal domain of Gal3 isoform 3, amino acids 1-125 of Gal3, the TRD of Gal3 isoform 3, or amino acids 50-123 of Gal3 isoform 3. In some embodiments, the anti-Gal3 antibody or binding fragment thereof does not bind to the N-terminus of Gal3 isoform 3, the N-terminal domain of Gal3 isoform 3, amino acids 1-125 of Gal3 isoform 3, the TRD of Gal3, or amino acids 50-123 of Gal3 isoform 3. In some embodiments, the anti-Gal3 antibody or binding fragment thereof binds to the C-terminus of Gal3 isoform 3, the C-terminal domain of Gal3 isoform 3, amino acids 126-264 of Gal3 isoform 3, or the CRD of Gal3. In some embodiments, the anti-Gal3 antibody or binding fragment thereof does not bind to the C-terminus of Gal3 isoform 3, the C-terminal domain of Gal3 isoform 3, amino acids 126-264 of Gal3 isoform 3, or the CRD of Gal3 isoform 3.

[0147] In some embodiments, the interaction between Gal3 and a cell surface marker can be reduced to less than 80%, less than 75%, less than 70%, less than 60%, less than 59%, less than 50%, less than 40%, less than 34%, less than 30%, less than 20%, less than 14%, less than 10%, less than 7%, less than 5%, less than 4%, or less than 1%.

[0148] In some embodiments, the interaction between Gal3 and the viral protein (e.g. SARS-CoV-2 S, E, M, or HE protein) can be reduced to less than 80%, less than 75%, less than 70%, less than 60%, less than 59%, less than 50%, less than 40%, less than 34%, less than 30%, less than 20%, less than 14%, less than 10%, less than 7%, less than 5%, less than 4%, or less than 1%. In some embodiments, the interaction between Gal3 and the host receptor protein (e.g. ACE2 or CD147) can be reduced to less than 80%, less than 75%, less than 70%, less than 60%, less than 59%, less than 50%, less than 40%, less than 34%, less than 30%, less than 20%, less than 14%, less than 10%, less than 7%, less than 5%, less than 4%, or less than 1%.

[0149] In some embodiments, the anti-Gal3 antibody or binding fragment thereof binds to Gal3 with a dissociation constant (K_{D}) of less than 1 nM, less than 1.2 nM, less than 2 nM, less than 5 nM, less than 10 nM, less than 13.5 nM, less than 15 nM, less than 20 nM, less than 25 nM, or less than 30 nM. In some embodiments, the anti-Gal3 antibody or binding fragment thereof binds to Gal3 with a K_{D} of less than 1 nM. In some embodiments, the anti-Gal3 antibody or binding fragment thereof binds to Gal3 with a K_{D} of less than 1.2 nM. In some embodiments, the anti-Gal3 antibody or binding fragment thereof binds to Gal3 with a K_{D} of less than 2 nM. In some embodiments, the anti-Gal3 antibody or binding fragment thereof binds to Gal3 with a K_{D} of less than 5 nM. In some embodiments, the anti-Gal3 antibody or binding fragment thereof binds to Gal3 with a K_{D} of less than 10 nM. In some embodiments, the anti-Gal3 antibody or binding fragment thereof binds to Gal3 with a K_{D} of less than 13.5 nM. In some embodiments, the anti-Gal3 antibody or binding fragment thereof binds to Gal3 with a K_{D} of less than 15 nM. In some embodiments, the anti-Gal3 antibody or binding fragment thereof binds to Gal3 with a K_{D} of less than 20 nM. In some embodiments, the anti-Gal3 antibody or binding fragment thereof binds to Gal3 with a K_{D} of less than 25 nM. In some embodiments, the anti-Gal3 antibody or binding fragment thereof binds to Gal3 with a K_{D} of less than 30 nM.

[0150] In some embodiments, the anti-Gal3 antibody or binding fragment thereof comprises any one of the variable heavy chain complementarity-determining region 1 (V_{H}-CDR1) sequences illustrated in FIG. 8 (SEQ ID NOs: 27-70). In some embodiments, the anti-Gal3 antibody comprises a V_{H}-CDR1 sequence having at least 60%, at least 65%, at least 70%, at least 75%, at least 80%, at least 85%, at least 86%, at least 87%, at least 88%, at least 89%, at least 90%, at least 91%, at least 92%, at least 93%, at least 94%, at least 95%, at least 96%, at least 97%, at least 98%, or at least 99% sequence identity to any one of SEQ ID NOs: 27-70. In some embodiments, the anti-Gal3 antibody comprises a V_{H}-CDR1 sequence having at least 60%, at least 65%, at least 70%, at least 75%, at least 80%, at least 85%, at least 86%, at least 87%, at least 88%, at least 89%, at least 90%, at least 91%, at least 92%, at least 93%, at least 94%, at least 95%, at least 96%, at least 97%, at least 98%, or at least 99% sequence similarity to any one of SEQ ID NOs: 27-70.

[0151] In some embodiments, the anti-Gal3 antibody or binding fragment thereof comprises any one of the variable heavy chain complementarity-determining region 2 (V_{H}-CDR2) sequences illustrated in FIG. 9 (SEQ ID NOs: 71-111, 826). In some embodiments, the anti-Gal3 antibody or binding fragment thereof comprises a V_{H}-CDR2 sequence having at least 60%, at least 65%, at least 70%, at least 75%, at least 80%, at least 85%, at least 86%, at least 87%, at least 88%, at least 89%, at least 90%, at least 91%, at least 92%, at least 93%, at least 94%, at least 95%, at least 96%, at least 97%, at least 98%, or at least 99% sequence identity to any one of SEQ ID NOs: 71-111, 826. In some embodiments, the anti-Gal3 antibody or binding fragment thereof comprises a V_{H}-CDR2 sequence having at least 60%, at least 65%, at least 70%, at least 75%, at least 80%, at least 85%, at least 86%, at least 87%, at least 88%, at least 89%, at least 90%, at least 91%, at least 92%, at least 93%, at least 94%, at least 95%, at least 96%, at least 97%, at least 98%, or at least 99% sequence similarity to any one of SEQ ID NOs: 71-111, 826.

[0152] In some embodiments, the anti-Gal3 antibody or binding fragment thereof comprises any one of the variable heavy chain complementarity-determining region 3 (V_{H}-CDR3) sequences illustrated in FIG. 10 (SEQ ID NOs: 112-169, 827). In some embodiments, the anti-Gal3 antibody or binding fragment thereof comprises a V_{H}-CDR3 sequence having at least 60%, at least 65%, at least 70%, at least 75%, at least 80%, at least 85%, at least 86%, at least 87%, at least 88%, at least 89%, at least 90%, at least 91%, at least 92%, at least 93%, at least 94%, at least 95%, at least 96%, at least 97%, at least 98%, or at least 99% sequence identity to any one of SEQ ID NOs: 112-169, 827. In some embodiments, the anti-Gal3 antibody or binding fragment thereof comprises a V_{H}-CDR3 sequence having at least 60%, at least 65%, at least 70%, at least 75%, at least 80%, at least 85%, at least 86%, at least 87%, at least 88%, at least 89%, at least 90%, at least 91%, at least 92%, at least 93%, at least 94%, at least 95%, at least 96%, at least 97%, at least 98%, or at least 99% sequence similarity to any one of SEQ ID NOs: 112-169, 827.

[0153] In some embodiments, the anti-Gal3 antibody or binding fragment thereof comprises any one of the variable light chain complementarity-determining region 1 (V_{L}-CDR1) sequences illustrated in FIG. 11 (SEQ ID NOs: 170-220). In some embodiments, the anti-Gal3 antibody or binding fragment thereof comprises a V_{L}-CDR1 sequence having at least 60%, at least 65%, at least 70%, at least 75%, at least 80%, at least 85%, at least 86%, at least 87%, at least 88%, at least 89%, at least 90%, at least 91%, at least 92%, at least 93%, at least 94%, at least 95%, at least 96%, at least 97%, at least 98%, or at least 99% sequence identity to any one of SEQ ID NOs: 170-220. In some embodiments, the anti-Gal3 antibody or binding fragment thereof comprises a V_{L}-CDR1 sequence having at least 60%, at least 65%, at least 70%, at least 75%, at least 80%, at least 85%, at least 86%, at least 87%, at least 88%, at least 89%, at least 90%, at least 91%, at least 92%, at least 93%, at least 94%, at least 95%, at least 96%, at least 97%, at least 98%, or at least 99% sequence similarity to any one of SEQ ID NOs: 170-220.

[0154] In some embodiments, the anti-Gal3 antibody or binding fragment thereof comprises any one of the variable light chain complementarity-determining region 2 (V_{L}-CDR2) sequences illustrated in FIG. 12 (SEQ ID NOs: 221-247). In some embodiments, the anti-Gal3 antibody or binding fragment thereof comprises a V_{L}-CDR2 sequence having at least 60%, at least 65%, at least 70%, at least 75%, at least 80%, at least 85%, at least 86%, at least 87%, at least 88%, at least 89%, at least 90%, at least 91%, at least 92%, at least 93%, at least 94%, at least 95%, at least 96%, at least 97%, at least 98%, or at least 99% sequence identity to any one of SEQ ID NOs: 221-247. In some embodiments, the anti-Gal3 antibody or binding fragment thereof comprises a V_{L}-CDR2 sequence having at least 60%, at least 65%, at least 70%, at least 75%, at least 80%, at least 85%, at least 86%, at least 87%, at least 88%, at least 89%, at least 90%, at least 91%, at least 92%, at least 93%, at least 94%, at least 95%, at least 96%, at least 97%, at least 98%, or at least 99% sequence similarity to any one of SEQ ID NOs: 221-247.

[0155] In some embodiments, the anti-Gal3 antibody or binding fragment thereof comprises any one of the variable light chain complementarity-determining region 3 (V_{L}-CDR3) sequences illustrated in FIG. 13 (SEQ ID NOs: 248-296). In some embodiments, the anti-Gal3 antibody or binding fragment thereof comprises a V_{L}-CDR3 sequence having at least 60%, at least 65%, at least 70%, at least 75%, at least 80%, at least 85%, at least 86%, at least 87%, at least 88%, at least 89%, at least 90%, at least 91%, at least 92%, at least 93%, at least 94%, at least 95%, at least 96%, at least 97%, at least 98%, or at least 99% sequence identity to any one of SEQ ID NOs: 248-296. In some embodiments, the anti-Gal3 antibody or binding fragment thereof comprises a V_{L}-CDR3 sequence having at least 60%, at least 65%, at least 70%, at least 75%, at least 80%, at least 85%, at least 86%, at least 87%, at least 88%, at least 89%, at least 90%, at least 91%, at least 92%, at least 93%, at least 94%, at least 95%, at least 96%, at least 97%, at least 98%, or at least 99% sequence similarity to any one of SEQ ID NOs: 248-296.

[0156] In some embodiments, the anti-Gal3 antibody or binding fragment thereof comprises a heavy chain variable region (V_{H}) and a light chain variable region (V_{L}). In some embodiments, the V_{H} may comprise a V_{H}-CDR1, a V_{H}-CDR2, and/or a V_{H}-CDR3 selected from any of FIG. 8-10. In some embodiments, the V_{L} may comprise a V_{L}-CDR1, a V_{L}-CDR2, and/or a V_{L}-CDR3 selected from any of FIG. 11-13. In some embodiments, the anti-Gal3 antibody or binding fragment thereof comprises CDRs within the V_{H} and V_{L} sequences as illustrated in FIG. 14. It is understood that an antibody with an antibody name described herein can be referred using a shortened version of the antibody name, as long as there are no conflicts with another antibody described herein. For example, F846C.1B2 can also be referred to as 846C.1B2, or 846.1B2.

[0157] In some embodiments, the anti-Gal3 antibody or binding fragment thereof comprises a heavy chain variable region (V_{H}) sequence selected from FIG. 15 (SEQ ID NOs: 297-373, 822, 828). In some embodiments, the anti-Gal3 antibody or binding fragment thereof comprises a V_{H}-sequence having at least 60%, at least 65%, at least 70%, at least 75%, at least 80%, at least 85%, at least 86%, at least 87%, at least 88%, at least 89%, at least 90%, at least 91%, at least 92%, at least 93%, at least 94%, at least 95%, at least 96%, at least 97%, at least 98%, or at least 99% sequence identity to any one of SEQ ID NOs: 297-373, 822, 828. In some embodiments, the anti-Gal3 antibody or binding fragment thereof comprises a V_{H}-sequence having at least 60%, at least 65%, at least 70%, at least 75%, at least 80%, at least 85%, at least 86%, at least 87%, at least 88%, at least 89%, at least 90%, at least 91%, at least 92%, at least 93%, at least 94%, at least 95%, at least 96%, at least 97%, at least 98%, or at least 99% sequence similarity to any one of SEQ ID NOs: 297-373, 822, 828.

[0158] In some embodiments, the anti-Gal3 antibody or binding fragment thereof comprises a light chain variable region (V_{L}) sequence selected from FIG. 16 (SEQ ID NOs: 374-447, 823-825). In some embodiments, the anti-Gal3 antibody or binding fragment thereof comprises a V_{L} sequence having at least 60%, at least 65%, at least 70%, at least 75%, at least 80%, at least 85%, at least 86%, at least 87%, at least 88%, at least 89%, at least 90%, at least 91%, at least 92%, at least 93%, at least 94%, at least 95%, at least 96%, at least 97%, at least 98%, or at least 99% sequence identity to any one of SEQ ID NOs: 374-447, 823-825. In some embodiments, the anti-Gal3 antibody or binding fragment thereof comprises a V_{L} sequence having at least 60%, at least 65%, at least 70%, at least 75%, at least 80%, at least 85%, at least 86%, at least 87%, at least 88%, at least 89%, at least 90%, at least 91%, at least 92%, at least 93%, at least 94%, at least 95%, at least 96%, at least 97%, at least 98%, or at least 99% sequence similarity to any one of SEQ ID NOs: 374-447, 823-825.

[0159] In some embodiments, the anti-Gal3 antibody or binding fragment thereof comprises a combination of heavy chain variable region and light chain variable region as illustrated in FIG. 17.

[0160] In some embodiments, the anti-Gal3 antibody or binding fragment thereof comprises heavy chain and light chain sequences as illustrated in FIG. 18 (SEQ ID NOs: 448-538, 830.

[0161] In some embodiments, the anti-Gal3 antibody or binding fragment thereof is selected from the group of: TB001, TB006, 12G5.D7, 13A12.2E5, 14H10.2C9, 15F10.2D6, 19B5.2E6, 20D11.2C6, 20H5.A3, 23H9.2E4, 2D10.2B2, 3B11.2G2, 7D8.2D8, mIMT001, 4A11.2B5, 4A11.H1L1, 4A11.H4L2, 4G2.2G6, 6B3.2D3, 6H6.2D6, 9H2.2H10, 13G4.2F8, 13H12.2F8, 15G7.2A7, 19D9.2E5, 23B10.2B12, 24D12.2H9, F846C.1B2, F846C.1F5, F846C.1H12, F846C.1H5, F846C.2H3, F846TC.14A2, F846TC.14E4, F846TC.16B5, F846TC.7F10, F847C.10B9, F847C.11B1, F847C.12F12, F847C.26F5, F847C.4B10, F849C.8D10, F849C.8H3, 846.2B11, 846.4D5, 846T.1H2, 847.14H4, 846.2D4, 846.2F11, 846T.10B1, 846T.2E3, 846T.4C9, 846T.4E11, 846T.4F5, 846T.8D1, 847.10C9, 847.11D6, 847.15D12, 847.15F9, 847.15H11, 847.20H7, 847.21B11, 847.27B9, 847.28D1, 847.2B8, 847.3B3, 849.1D2, 849.2D7, 849.2F12, 849.4B2, 849.4F12, 849.4F2, 849.5C2, 849.8D12, F847C.21H6, 849.5H1, 847.23F11, 847.16D10, 847.13E2-mH0mL1, 847.13E2-mH0mL2, 847.12C4, 847.4D3, 2D10-VH0-VL0, or a binding fragment thereof.

[0162] In some embodiments, the anti-Gal3 antibody or binding fragment thereof comprises, consists essentially of, or consists of TB001, TB006, 12G5.D7, 13A12.2E5, 14H10.2C9, 15F10.2D6, 19B5.2E6, 20D11.2C6, 20H5.A3, 23H9.2E4, 2D10.2B2, 3B11.2G2, 7D8.2D8, mIMT001, 4A11.2B5, 4A11.H1L1, 4A11.H4L2, 4G2.2G6, 6B3.2D3, 6H6.2D6, 9H2.2H10, 13G4.2F8, 13H12.2F8, 15G7.2A7, 19D9.2E5, 23B10.2B12, 24D12.2H9, F846C.1B2, F846C.1F5, F846C.1H12, F846C.1H5, F846C.2H3, F846TC.14A2, F846TC.14E4, F846TC.16B5, F846TC.7F10, F847C.10B9, F847C.11B1, F847C.12F12, F847C.26F5, F847C.4B10, F849C.8D10, F849C.8H3, 846.2B11, 846.4D5, 846T.1H2, 847.14H4, 846.2D4, 846.2F11, 846T.10B1, 846T.2E3, 846T.4C9, 846T.4E11, 846T.4F5, 846T.8D1, 847.10C9, 847.11D6, 847.15D12, 847.15F9, 847.15H11, 847.20H7, 847.21B11, 847.27B9, 847.28D1, 847.2B8, 847.3B3, 849.1D2, 849.2D7, 849.2F12, 849.4B2, 849.4F12, 849.4F2, 849.5C2, 849.8D12, F847C.21H6, 849.5H1, 847.23F11, 847.16D10, 847.13E2-mH0mL1, 847.13E2-mH0mL2, 847.12C4, 847.4D3, 2D10-VH0-VL0, or a binding fragment thereof.

[0163] In some embodiments, the anti-Gal3 antibody or binding fragment thereof comprises one or more heavy chain variable region CDRs depicted in FIG. 8-10. In some embodiments, the anti-Gal3 antibody or binding fragment thereof comprises one or more light chain variable region CDRs depicted in FIG. 11-13. In some embodiments, the anti-Gal3 antibody or binding fragment thereof comprises a heavy chain variable region depicted in FIG. 15. In some embodiments, the anti-Gal3 antibody or binding fragment thereof comprises a light chain variable region depicted in FIG. 16. In some embodiments, the anti-Gal3 antibody or binding fragment thereof comprises a combination of heavy chain variable region and light chain variable region depicted in FIG. 17. In some embodiments, the anti-Gal3 antibody or binding fragment thereof comprises a heavy chain and/or light chain depicted in FIG. 18. In some embodiments, the anti-Gal3 antibody or binding fragment thereof can comprise or include any one or more of the sequences provided in any one or more of FIG. 8, 9, 10, 11, 12, 13, 14, 15, 16, 17 or 18 or any one or more of a sequence that is at least 80%, 81%, 82%, 83%, 84%, 85%, 86%, 87%, 88%, 89%, 90%, 91%, 92%, 93%, 94%, 95%, 96%, 97%, 98%, 99% or greater identical thereto. In some embodiments, the anti-Gal3 antibody or binding fragment thereof can comprise or include any one or more of the sequences provided in any one or more of FIG. 8, 9, 10, 11, 12, 13, 14, 15, 16, 17 or 18 or any one or more of a sequence that is at least 80%, 81%, 82%, 83%, 84%, 85%, 86%, 87%, 88%, 89%, 90%, 91%, 92%, 93%, 94%, 95%, 96%, 97%, 98%, 99% or greater similar thereto.

[0164] In some embodiments, the anti-Gal3 antibody or binding fragment thereof comprises a humanized antibody or binding fragment thereof. In other instances, the anti-Gal3 antibody or binding fragment thereof comprises a chimeric antibody or binding fragment thereof. In some embodiments, the anti-Gal3 antibody comprises a full-length antibody or a binding fragment thereof. In some embodiments, the anti-Gal3 antibody or binding fragment thereof comprises a bispecific antibody or a binding fragment thereof. In some embodiments, the anti-Gal3 antibody or binding fragment thereof comprises a monovalent Fab′, a divalent Fab2, a single-chain variable fragment (scFv), a diabody, a minibody, a nanobody, a single-domain antibody (sdAb), or a camelid antibody or binding fragment thereof.

[0165] In some embodiments, the anti-Gal3 antibody or binding fragment thereof is a bispecific antibody or binding fragment thereof. Exemplary bispecific antibody formats include, but are not limited to, Knobs-into-Holes (KiH), Asymmetric Re-engineering Technology-immunoglobulin (ART-Ig), Triomab quadroma, bispecific monoclonal antibody (BiMAb, BsmAb, BsAb, bsMab, BS-Mab, or Bi-MAb), Azymetric, Biclonics, Fab-scFv-Fc, Two-in-one/Dual Action Fab (DAF), FinomAb, scFv-Fc-(Fab)-fusion, Dock-aNd-Lock (DNL), Tandem diAbody (TandAb), Dual-affinity-ReTargeting (DART), nanobody, triplebody, tandems scFv (taFv), triple heads, tandem dAb/VHH, triple dAb/VHH, or tetravalent dAb/VHH. In some embodiments, the anti-Gal3 antibody or binding fragment thereof is a bispecific antibody or binding fragment thereof comprising a bispecific antibody format illustrated in FIG. 2 of Brinkmann and Kontermann, “The making of bispecific antibodies,” MABS 9(2): 182-212 (2017).

[0166] In some embodiments, the anti-Gal3 antibody or binding fragment thereof can comprise an IgM, IgG (e.g., IgG1, IgG2, IgG3, or IgG4), IgA, or IgE framework. The IgG framework can be IgG1, IgG2, IgG3 or IgG4. In some embodiments, the anti-Gal3 antibody or binding fragment thereof comprises an IgG1 framework. In some embodiments, the anti-Gal3 antibody or binding fragment thereof comprises an IgG2 framework. In some embodiments, the anti-Gal3 antibody or binding fragment thereof comprises an IgG4 framework. The anti-Gal3 antibody or binding fragment thereof can further comprise a Fc mutation.

[0167] In some embodiments, the Fc region comprises one or more mutations that modulate Fc receptor interactions, e.g., to enhance effector functions such as ADCC and/or CDC. In such instances, exemplary residues when mutated modulate effector functions include 5239, K326, A330, 1332, or E333, in which the residue position correspond to IgG1 and the residue numbering is in accordance to Kabat numbering (EU index of Kabat et al 1991 Sequences of Proteins of Immunological Interest) (FIG. 19). In some embodiments, the one or more mutations comprise S239D, K326W, A330L, I332E, E333A, E333S, or a combination thereof. In some embodiments, the one or more mutations comprise S239D, I332E, or a combination thereof. In some embodiments, the one or more mutations comprise S239D, A330L, I332E, or a combination thereof. In some embodiments, the one or more mutations comprise K326W, E333S, or a combination thereof. In some embodiments, the mutation comprises E333A.

[0168] In some embodiments, an anti-Gal3 antibody or binding fragment thereof comprises a humanization score of above 70, above 80, above 81, above 82, above 83, above 84, above 85, above 86, above 87, above 88, above 89, above 90, or above 95. In some embodiments, the anti-Gal3 antibody or binding fragment thereof comprises a humanization score of above 80. In some embodiments, the anti-Gal3 antibody or binding fragment thereof comprises a humanization score of above 83. In some embodiments, the anti-Gal3 antibody or binding fragment thereof comprises a humanization score of above 85. In some embodiments, the anti-Gal3 antibody or binding fragment thereof comprises a humanization score of above 87. In some embodiments, the anti-Gal3 antibody or binding fragment thereof comprises a humanization score of above 90. In some embodiments, the anti-Gal3 antibody or binding fragment thereof comprises a humanization score of the heavy chain of above 70, above 80, above 81, above 82, above 83, above 84, above 85, above 86, above 87, above 88, above 89, above 90, or above 95, optionally above 80, above 85, or above 87. In some embodiments, the anti-Gal3 antibody or binding fragment thereof comprises a humanization score of the light chain of above 70, above 80, above 81, above 82, above 83, above 84, above 85, above 86, above 87, above 88, above 89, above 90, or above 95, optionally above 80, above 83, or above 85.

[0169] Also disclosed herein are proteins. In some embodiments, the proteins comprise one or more of SEQ ID NOs: 170-533. In some embodiments, the proteins comprise a sequence having at least 80%, 81%, 82%, 83%, 84%, 85%, 86%, 87%, 88%, 89%, 90%, 91%, 92%, 93%, 94%, 95%, 96%, 97%, 98%, 99%, or 100% identity to one or more of SEQ ID NOs: 170-533. In some embodiments, the proteins comprise a sequence having at least 0, 1, 2, 3, 4, 5, or 6 substitutions relative to any one or more sequences of SEQ ID NOs: 170-533. In some embodiments, the proteins comprise six sequences selected from each of SEQ ID NOs: 170-220; SEQ ID NOs: 221-247; SEQ ID NOs: 248-296; SEQ ID NOs: 27-70; SEQ ID NOs: 71-111, 826; and SEQ ID NOs: 112-169, 827. In some embodiments, the proteins comprise two sequences selected from each of SEQ ID NOs: 374-447, 823-825 and SEQ ID NOs: 297-373, 822, 828. In some embodiments, the proteins comprise two sequences selected from each of SEQ ID NOs: 495-538, 830 and SEQ ID NOs: 448-494, 829. In some embodiments, the proteins comprise any one or more sequences selected from the groups of SEQ ID NOs: 170-220; SEQ ID NOs: 221-247; SEQ ID NOs: 248-296; SEQ ID NOs: 27-70; SEQ ID NOs: 71-111, 826; SEQ ID NOs: 112-169, 827; SEQ ID NOs: 374-447, 823-825; SEQ ID NOs: 297-373, 822, 828; SEQ ID NOs: 495-538, 830; SEQ ID NOs: 448-494, 829. In some embodiments, the proteins comprise any one or more of the sequences depicted in FIGS. 8-18.

[0170] In some embodiments, the protein comprises one or more sequences defined by a consensus sequence. The consensus sequences provided herein have been derived from the alignments of CDRs depicted in FIG. 33A-B. However, it is envisioned that alternative alignments may be done (e.g. using global or local alignment, or with different algorithms, such as Hidden Markov Models, seeded guide trees, Needleman-Wunsch algorithm, or Smith-Waterman algorithm) and as such, alternative consensus sequences can be derived.

[0171] In some embodiments, the protein comprises a sequence defined by the formula X₁X₂X₃X₄X₅X₆X₇X₈X₉X₁₀X₁₁X₁₂X₁₃X₁₄X₁₅X₁₆X₁₇, where X₁ is no amino acid or R; X₂ is no amino acid or S; X₃ is no amino acid, S, or T; X₄ is no amino acid, E, G, K, Q, or R; X₅ is no amino acid, A, D, G, I, N, or S; X₆ is no amino acid, I, L, or V; X₇ is no amino acid, F, L, S, or V; X₈ is no amino acid, D, E, H, N, S, T, or Y; X₉ is no amino acid, D, E, I, K, N, R, S, T, or V; X₁₀ is no amino acid, D, H, N, R, S, or Y; X₁₁ is no amino acid, A, G, N, S, T, or V; X₁₂ is no amino acid, A, I, K, N, Q, T, V, or Y; X₁₃ is no amino acid, D, G, H, K, N, S, T, or Y; X₁₄ is no amino acid, C, F, I, N, S, T, V, or Y; X₁₅ is no amino acid, D, L, N, W, or Y; X₁₆ is no amino acid, N, or D; X₁₇ is no amino acid or D. In some embodiments, the protein comprises a sequence having at least 80%, 81%, 82%, 83%, 84%, 85%, 86%, 87%, 88%, 89%, 90%, 91%, 92%, 93%, 94%, 95%, 96%, 97%, 98%, 99%, or 100% identity to this consensus sequence. In some embodiments, the protein comprises a sequence having 0, 1, 2, 3, 4, 5, or 6 substitutions from this consensus sequence.

[0172] In some embodiments, the protein comprises a sequence defined by the formula X₁X₂X₃X₄X₅X₆X₇X₈, where X₁ is no amino acid, K, L, N, Q, or R; X₂ is no amino acid, A, L, M, or V; X₃ is no amino acid, C, K, or S; X₄ is no amino acid or T; X₅ is no amino acid, A, E, F, G, H, K, Q, R, S, W, or Y; X₆ is no amino acid, A, G, or T; X₇ is no amino acid, I, K, N, S, or T; X₈ is no amino acid, N, or S. In some embodiments, the protein comprises a sequence having at least 80%, 81%, 82%, 83%, 84%, 85%, 86%, 87%, 88%, 89%, 90%, 91%, 92%, 93%, 94%, 95%, 96%, 97%, 98%, 99%, or 100% identity to this consensus sequence. In some embodiments, the protein comprises a sequence having 0, 1, 2, 3, 4, 5, or 6 substitutions from this consensus sequence.

[0173] In some embodiments, the protein comprises a sequence defined by the formula X₁X₂X₃X₄X₅X₆X₇X₈X₉X₁₀, where X₁ is no amino acid, A, E, F, H, L, M, Q, S, V, or W; X₂ is A, H, or Q; X₃ is D, F, G, H, L, M, N, Q, S, T, W, or Y; X₄ is no amino acid or W; X₅ is A, D, I, K, L, N, Q, R, S, T, V, or Y; X₆ is D, E, H, I, K, L, N, Q, S, or T; X₇ is D, F, K, L, N, P, S, T, V, W, or Y; X₈ is H, P, or S; X₉ is F, L, P, Q, R, T, W, or Y; X₁₀ is no amino acid, T, or V. In some embodiments, the protein comprises a sequence having at least 80%, 81%, 82%, 83%, 84%, 85%, 86%, 87%, 88%, 89%, 90%, 91%, 92%, 93%, 94%, 95%, 96%, 97%, 98%, 99%, or 100% identity to this consensus sequence. In some embodiments, the protein comprises a sequence having 0, 1, 2, 3, 4, 5, or 6 substitutions from this consensus sequence.

[0174] In some embodiments, the protein comprises a sequence defined by the formula X₁X₂X₃X₄X₅X₆X₇X₈X₉X₁₀, where X₁ is E, G, or R; X₂ is F, N, or Y; X₃ is A, I, K, N, S, or T; X₄ is F, I, or L; X₅ is I, K, N, R, S, or T; X₆ is D, G, I, N, S, or T; X₇ is F, G, H, S, or Y; X₈ is no amino acid, A, D, G, I, M, N, T, V, W, or Y; X₉ is no amino acid, M, or Y; X₁₀ is no amino acid or G; In some embodiments, the protein comprises a sequence having at least 80%, 81%, 82%, 83%, 84%, 85%, 86%, 87%, 88%, 89%, 90%, 91%, 92%, 93%, 94%, 95%, 96%, 97%, 98%, 99%, or 100% identity to this consensus sequence. In some embodiments, the protein comprises a sequence having 0, 1, 2, 3, 4, 5, or 6 substitutions from this consensus sequence.

[0175] In some embodiments, the protein comprises a sequence defined by the formula X₁X₂X₃X₄X₅X₆X₇X₈X₉X₁₀, where X₁ is no amino acid, I, or L; X₂ is no amino acid or R; X₃ is no amino acid, F, I, L, or V; X₄ is A, D, F, H, K, L, N, S, W, or Y; X₅ is A, D, P, S, T, W, or Y; X₆ is D, E, G, H, K, N, S, V, or Y; X₇ is D, E, G, N, S, or T; X₈ is D, G, I, K, N, Q, R, S, V, or Y; X₉ is A, D, E, G, I, K, N, P, S, T, V, or Y; X₁₀ is no amino acid, I, P, S, or T. In some embodiments, the protein comprises a sequence having at least 80%, 81%, 82%, 83%, 84%, 85%, 86%, 87%, 88%, 89%, 90%, 91%, 92%, 93%, 94%, 95%, 96%, 97%, 98%, 99%, or 100% identity to this consensus sequence. In some embodiments, the protein comprises a sequence having 0, 1, 2, 3, 4, 5, or 6 substitutions from this consensus sequence.

[0176] In some embodiments, the protein comprises a sequence defined by the formula X₁X₂X₃X₄X₅X₆X₇X₈X₉X₁₀X₁₁X₁₂X₁₃X₁₄X₁₅X₁₆X₁₇X₁₈X₁₉X₂₀X₂₁X₂₂X₂₃X₂₄X₂₅, where X₁ is no amino acid or A; X₂ is no amino acid, A, R, or Y; X₃ is no amino acid, A, F, H, K, L, R, S, or V; X₄ is no amino acid, A, D, K, N, R, S, or T; X₅ is no amino acid, A, D, G, H, I, L, N, P, R, S, T, V, or Y; X₆ is no amino acid, A, D, G, H, K, N, P, Q, R, S, or Y; X₇ is no amino acid, D, F, G, H, P, R, S, W, or Y; X₈ is no amino acid, A, D, E, G, I, R, or S; X₉ is no amino acid, A, C, D, E, F, G, I, N, R, S, T, V, or Y; X₁₀ is no amino acid, A, D, M, P, R, S, T, V, or Y; X₁₁ is no amino acid, A, D, E, F, L, T, V, or Y; X₁₂ is no amino acid, A, G, L, M, R, or T; X₁₃ is no amino acid, A, D, E, F, G, R, S, T, or V; X₁₄ is no amino acid, A, D, G, L, P, Q, R, S, T, V, or Y; X₁₅ is no amino acid, A, D, G, N, S, V, W, or Y; X₁₆ is no amino acid, A, D, E, F, L, P, T, V, W, or Y; X₁₇ is no amino acid, F, I, L, M, R, or Y; X₁₈ is no amino acid, A, D, G, N, or T; X₁₉ is no amino acid, F, N, S, T, V, or Y; X₂₀ is no amino acid or L; X₂₁ is no amino acid or A; X₂₂ is no amino acid or W; X₂₃ is no amino acid or F; X₂₄ is no amino acid or A; X₂₅ is no amino acid or Y. In some embodiments, the protein comprises a sequence having at least 80%, 81%, 82%, 83%, 84%, 85%, 86%, 87%, 88%, 89%, 90%, 91%, 92%, 93%, 94%, 95%, 96%, 97%, 98%, 99%, or 100% identity to this consensus sequence. In some embodiments, the protein comprises a sequence having 0, 1, 2, 3, 4, 5, or 6 substitutions from this consensus sequence.

### Exemplary Pharmaceutical Formulations

[0177] A pharmaceutical formulation for treating a disease as described herein can comprise an anti-Gal3 antibody or binding fragment thereof described supra. The anti-Gal3 antibody or binding fragment thereof can be formulated for systemic administration. Alternatively, the anti-Gal3 antibody or binding fragment thereof can be formulated for parenteral administration.

[0178] In some embodiments, an anti-Gal3 antibody or binding fragment thereof is formulated as a pharmaceutical composition for administration to a subject by, but not limited to, parenteral (e.g., intravenous, subcutaneous, intramuscular, intraarterial, intradermal, intraperitoneal, intravitreal, intracerebral, or intracerebroventricular), oral, intranasal, buccal, rectal, or transdermal administration routes. In some embodiments, the pharmaceutical composition describe herein is formulated for parenteral (e.g., intravenous, subcutaneous, intramuscular, intraarterial, intradermal, intraperitoneal, intravitreal, intracerebral, or intracerebroventricular) administration. In other instances, the pharmaceutical composition describe herein is formulated for systemic administration. In other instances, the pharmaceutical composition describe herein is formulated for oral administration. In still other instances, the pharmaceutical composition describe herein is formulated for intranasal administration.

[0179] In some embodiments, the pharmaceutical compositions further include pH adjusting agents or buffering agents which include acids such as acetic, boric, citric, lactic, phosphoric and hydrochloric acids; bases such as sodium hydroxide, sodium phosphate, sodium borate, sodium citrate, sodium acetate, sodium lactate and tris-hydroxymethylaminomethane; and buffers such as citrate/dextrose, sodium bicarbonate and ammonium chloride. Such acids, bases and buffers are included in an amount required to maintain pH of the composition in an acceptable range.

[0180] In some embodiments, the pharmaceutical compositions include one or more salts in an amount required to bring osmolality of the composition into an acceptable range. Such salts include those having sodium, potassium or ammonium cations and chloride, citrate, ascorbate, borate, phosphate, bicarbonate, sulfate, thiosulfate or bisulfite anions; suitable salts include sodium chloride, potassium chloride, sodium thiosulfate, sodium bisulfite and ammonium sulfate.

[0181] In some embodiments, the pharmaceutical compositions further include diluent which are used to stabilize compounds because they can provide a more stable environment. Salts dissolved in buffered solutions (which also can provide pH control or maintenance) are utilized as diluents in the art, including, but not limited to a phosphate buffered saline solution. In certain instances, diluents increase bulk of the composition to facilitate compression or create sufficient bulk for homogenous blend for capsule filling. Such compounds can include e.g., lactose, starch, mannitol, sorbitol, dextrose, microcrystalline cellulose such as Avicel®; dibasic calcium phosphate, dicalcium phosphate dihydrate; tricalcium phosphate, calcium phosphate; anhydrous lactose, spray-dried lactose; pregelatinized starch, compressible sugar, such as Di-Pac® (Amstar); mannitol, hydroxypropylmethylcellulose, hydroxypropylmethylcellulose acetate stearate, sucrose-based diluents, confectioner's sugar; monobasic calcium sulfate monohydrate, calcium sulfate dihydrate; calcium lactate trihydrate, dextrates; hydrolyzed cereal solids, amylose; powdered cellulose, calcium carbonate; glycine, kaolin; mannitol, sodium chloride; inositol, bentonite, and the like.

[0182] In some embodiments, the pharmaceutical formulations include, but are not limited to, aqueous liquid dispersions, self-emulsifying dispersions, solid solutions, liposomal dispersions, aerosols, solid dosage forms, powders, immediate release formulations, controlled release formulations, fast melt formulations, tablets, capsules, pills, delayed release formulations, extended release formulations, pulsatile release formulations, multiparticulate formulations (e.g., nanoparticle formulations), and mixed immediate and controlled release formulations.

[0183] In some embodiments, the pharmaceutical formulation can further comprise an additional therapeutic agent. Non-limiting examples of additional therapeutic agents include alpha-glucosidase inhibitors, including acarbose (Precose®) and miglitol (Glyset®); biguanides, including metformin-alogliptin (Kazano®), metformin-canagliflozin (Invokamet®), metformin-dapagliflozin (Xigduo® XR), metformin-empagliflozin (Synjardy®), metformin-glipizide, metformin-glyburide (Glucovance®), metformin-linagliptin (Jentadueto®), metformin-pioglitazone (Actoplus®), metformin-repaglinide (PrandiMet®), metformin-rosiglitazone (Avandame®), metformin-saxagliptin (Kombiglyze® XR), and metformin-sitagliptin (Janume®); dopamine agonists, including Bromocriptine (Cyclose®); Dipeptidyl peptidase-4 (DPP-4) inhibitors, including alogliptin (Nesina®), alogliptin-metformin (Kazano®), alogliptin-pioglitazone (Oseni®), linagliptin (Tradjenta®), linagliptin-empagliflozin (Glyxambi®), linagliptin-metformin (Jentadueto®), saxagliptin (Onglyza®), saxagliptin-metformin (Kombiglyze® XR), sitagliptin (Januvia®), sitagliptin-metformin (Janumet® and Janumet® XR), and sitagliptin and simvastatin (Juvisync®); Glucagon-like peptide-1 receptor agonists (GLP-1 receptor agonists), including albiglutide (Tanzeum®), dulaglutide (Trulicity®), exenatide (Byetta®), exenatide extended-release (Bydureon®), and liraglutide (Victoza®), semaglutide (Ozempic®); Meglitinides, including nateglinide (Starlix®), repaglinide (Prandin®), and repaglinide-metformin (Prandimet®); Sodium-glucose transporter (SGLT) 2 inhibitors, including dapagliflozin (Farxiga®), dapagliflozin-metformin (Xigduo® XR), canagliflozin (Invokana®), canagliflozin-metformin (Invokamet®), empagliflozin (Jardiance), empagliflozin-linagliptin (Glyxambi®), empagliflozin-metformin (Synjardy®), and ertugliflozin (Steglatro®); Sulfonylureas, including glimepiride (Amaryl®), glimepiride-pioglitazone (Duetac®), glimepiride-rosiglitazone (Avandaryl®), gliclazide, glipizide (Glucotro®), glipizide-metformin (Metaglip®), glyburide (DiaBeta®, Glynase®, Micronase®), glyburide-metformin (Glucovance®), chlorpropamide (Diabinese®), tolazamide (Tolinase®), and tolbutamide (Orinase®, Tol-Tab®); Thiazolidinediones, including rosiglitazone (Avandia®), rosiglitazone-glimepiride (Avandaryl®), rosiglitazone-metformin (Amaryl M®), pioglitazone (Actos®), pioglitazone-alogliptin (Oseni®), pioglitazone-glimepiride (Duetact®), pioglitazone-metformin (Actoplus Met®, Actoplus Met® XR).

[0184] Disclosed herein are pharmaceutical antibody formulations. These pharmaceutical antibody formulations can be used for therapeutic applications. In some embodiments, the pharmaceutical antibody formulations comprise a therapeutically effective amount of an antibody, such as an anti-Gal3 antibody. In some embodiments, the antibody is any of the anti-Gal3 antibodies disclosed herein or otherwise known in the art, such as those described in WO 2020/160156. The pharmaceutical antibody formulations may also comprise one or more excipients, diluents, salts, buffers, and the like, which confer desirable properties to the formulation, such as improved stability, reduction in aggregation, and modulation of isotonicity and pH. It is envisioned that one or more excipients, diluents, salts, buffers, and the like generally known in the art can be used in the pharmaceutical antibody formulations disclosed herein and/or can be used as an acceptable substitute for any of the excipients, diluents, salts, buffers, and the like used in the pharmaceutical antibody formulations disclosed herein, and determining an optimal formulation of excipients, diluents, salts, buffers, and the like is within the ability of one skilled in the art. The inclusion of one or more excipients, diluents, salts, buffers, and the like may be adjusted for the treatment of a certain disease, such as a coronavirus infection, or inflammation associated with said disease, and/or optimized to improve the stability of the pharmaceutical antibody formulations under storage.

[0185] Disclosed in some embodiments are pharmaceutical antibody formulations comprising an antibody and one or more excipients. The one or more excipients may be used to improve stability of the anti-Gal3 antibody under storage conditions and/or improve biocompatibility when administered to a subject. The one or more excipients may comprise small molecules, amino acids, peptides, proteins, nucleic acids, DNA, RNA, lipids, ionic compounds, salts, carbohydrates, sugars, sugar alcohols, acids, bases, surfactants, detergents, or other excipients known in the art. In some embodiments, the pharmaceutical antibody formulations are at a specific pH that improves stability of the anti-Gal3 antibody under storage conditions and/or improve biocompatibility when administered to a subject. In some embodiments, the one or more excipients are used to adjust the pH to the desired level. In some embodiments, the pH of the pharmaceutical antibody formulations are adjusted after addition of the one or more excipients to the desired pH (e.g. by addition of a compatible acid or base, such as HCl, H₂SO₄, acetic acid, citric acid, phosphates, NaOH, KOH, etc.). The pharmaceutical antibody formulations may be acidic, basic, or neutral. In some embodiments, the antibody is an anti-Gal3 antibody.

[0186] In some embodiments of the pharmaceutical antibody formulations disclosed herein comprising an antibody and one or more excipients, the one or more excipients comprise one or more amino acids, one or more salts, one or more surfactants, or any combination thereof. In some embodiments, the one or more amino acids may comprise alanine, arginine, asparagine, aspartic acid, cysteine, glutamine, glutamic acid, glycine, histidine, isoleucine, leucine, lysine, methionine, phenylalanine, proline, serine, threonine, tryptophan, tyrosine, valine, or any combination thereof. The one or more amino acids used as excipients may be L-stereoisomers or D-stereoisomers. In some embodiments, the one or more amino acids may be in the form of small peptides, such as dipeptides, tripeptides, tetrapeptides, or more. Some embodiments of the pharmaceutical antibody formulations comprise histidine or methionine, or both. In some embodiments, the histidine or methionine, or both, are L-stereoisomers or D-stereoisomers. Other amino acids, either as substitutes of histidine or methionine, or both, or in addition to histidine or methionine, or both, are also envisioned in some embodiments, depending on the desired properties conferred to the formulations, such as improved stability, pH adjustment, and compatibility to the intended subject. Some non-limiting embodiments of pharmaceutical antibody formulations may comprise 1) histidine and methionine, 2) histidine and any one or more other amino acids, 3) methionine and any one or more other amino acids, 4) one or more amino acids other than histidine and methionine (e.g. one or more of arginine, glycine, or glutamate), or 5) histidine, methionine, and one or more other amino acids (e.g. one or more of arginine, glycine, or glutamate). In some embodiments, the antibody is an anti-Gal3 antibody.

[0187] In some embodiments of the pharmaceutical antibody formulations disclosed herein comprising an antibody and one or more excipients, including the ones comprising one or more amino acids as disclosed herein, the one or more excipients comprise one or more salts. In some embodiments, the one or more salts may comprise salts conventionally used as excipients. In some embodiments, the one or more salts may comprise chloride salts, phosphate salts, carbonate salts, bicarbonate salts, citrate salts, ascorbate salts, acetate salts, succinate salts, Tris salts, borate salts, sulfate salts, ammonia salts, metal salts, sodium salts, potassium salts, calcium salts, magnesium salts, organic salts, amino acid salts, nucleic acid salts, aromatic salts, low solubility salts, and the like, including any disclosed throughout the present disclosure. The purpose of using one or more salts as an excipient includes but is not limited to improving stability and reducing aggregation of an antibody, equalizing ionic charges for other components in the formulation, adjusting solubility of other components in the formulation, adjusting pH and isotonicity, and improving biocompatibility for administration to a subject. Exemplary pharmaceutical antibody formulations disclosed herein comprise NaCl. However, alternative salts may also be used, either instead of NaCl or in addition to NaCl, including but not limited to those provided herein, such as other chloride salts, other sodium salts, ascorbate salts, acetate salts, phosphate salts, citrate salts, Tris salts, or succinate salts, or those otherwise known in the art. In some embodiments, the antibody is an anti-Gal3 antibody.

[0188] In some embodiments of the pharmaceutical antibody formulations disclosed herein comprising an antibody and one or more excipients, including the ones comprising one or more amino acids and/or one or more salts as disclosed herein, the one or more excipients comprise one or more surfactants. In some embodiments, the one or more surfactants may comprise surfactants conventionally used as excipients. In some embodiments, the one or more surfactants may include polysorbate, polysorbate 20, polysorbate 40, polysorbate 60, polysorbate 80, oils, poloxamers, poloxamer 188, polyglycosides, cetyl alcohol, cocamides, stearates, laurates, nonoxynols, octoxynols, or other surfactants generally known in the art and used as excipients, including any disclosed throughout the present disclosure. In some embodiments, the surfactants may also act as wetting agents, detergents, or emulsifying agents, depending on the specific surfactant and the intended purpose. The purpose of these surfactants in the pharmaceutical antibody formulations may include but are not limited to improving the solubility of the antibody or the other excipients, improving stability of the antibody, and preventing aggregation of the antibody. Exemplary pharmaceutical antibody formulations disclosed herein comprise a polysorbate. In some embodiments, the polysorbate may be polysorbate 20, polysorbate 40, polysorbate 60, or polysorbate 80, or any combination thereof. In some embodiments, the polysorbate is polysorbate 80. However, alternative surfactants may also be used, either instead of the polysorbate, or in addition to the polysorbate, including but not limited to those provided herein, such as poloxamer 188, or those otherwise known in the art. In some embodiments, the antibody is an anti-Gal3 antibody.

[0189] In some embodiments of the pharmaceutical antibody formulations disclosed herein comprising an antibody and one or more excipients, including the ones comprising one or more amino acids, one or more salts, and/or one or more surfactants disclosed herein, the one or more excipients may also comprise one or more sugars or sugar alcohols. In some embodiments, the one or more sugars or sugar alcohols include those conventionally used as excipients. In some embodiments, the sugars include but are not limited to erythrose, arabinose, ribose, deoxyribose, xylose, galactose, glucose (dextrose), fructose, isomaltose, lactose, maltose, sucrose, trehalose, maltodextrin, chitosan, dextrin, dextran, dextran 40, cellulose, or starch, or other sugars generally known in the art and used as excipients, including any disclosed throughout the present disclosure. In some embodiments, the sugar alcohols include but are not limited to glycerol, erythritol, arabitol, xylitol, ribitol, deoxyribitol, mannitol, sorbitol, galactitol, isomalt, maltitol, or lactitol, or other sugar alcohols generally known in the art and used as excipients, including any disclosed throughout the present disclosure. The purpose of these sugars and sugar alcohols in the pharmaceutical antibody formulations may include but are not limited to improving the stability and preventing aggregation of the antibody. Exemplary pharmaceutical antibody formulations disclosed herein may comprise a sugar or a sugar alcohol, or both. In some embodiments, exemplary pharmaceutical antibody formulations comprise sucrose and/or mannitol. However, alternative sugars and sugar alcohols may be used, either instead of the sucrose and/or mannitol, or in addition to the sucrose and/or mannitol, including but not limited to those provided herein, such as sorbitol, trehalose, dextrose, dextran, or dextran 40. In some embodiments, formulations that are intended for subcutaneous use comprise any one or more of the sugars or sugar alcohols disclosed herein, including sucrose and/or mannitol. In some embodiments, formulations that are intended for intravenous use might not comprise any one or more of the sugars or sugar alcohols disclosed herein, including sucrose and/or mannitol. In some embodiments, the antibody is an anti-Gal3 antibody.

[0190] In some embodiments, the pharmaceutical antibody formulations comprise an antibody. In some embodiments, the antibody is an anti-Gal3 antibody. In some embodiments, the anti-Gal3 antibody is any one of the anti-Gal3 antibodies disclosed herein, or otherwise known in the art, such as those disclosed in WO 2020/160156. The anti-Gal3 antibody may be a full length antibody, an Fab fragment, an F(ab′)2 fragment, an scFv, an sdAb, a monovalent fragment, or any other modified antibody known in the art, including bispecific, trispecific, and other multi-specific variants. The anti-Gal3 antibody will generally comprise complementarity-determining regions (CDRs). In some embodiments, the anti-Gal3 antibody may comprise a heavy chain CDR1 (V_{H}—CDR1), heavy chain CDR2 (V_{H}-CDR2), heavy chain CDR3 (V_{H}-CDR3) and/or light chain CDR1 (V_{L}-CDR1), light chain CDR2 (V_{L}-CDR2), or light chain CDR3 (V_{L}-CDR3), or any combination thereof. In some embodiments, the antibody comprises a V_{H}-CDR1 having the sequence of SEQ ID NO: 31, a V_{H}-CDR2 having the sequence of SEQ ID NO: 72, a V_{H}-CDR3 having the sequence of SEQ ID NO: 113, a V_{L}-CDR1 having the sequence of SEQ ID NO: 171, a V_{L}-CDR2 having the sequence of SEQ ID NO: 222; and a V_{L}-CDR3 having the sequence of SEQ ID NO: 249. In some embodiments, exemplary CDR sequences are depicted in FIGS. 8-13. In some embodiments, each CDR can have up to 1, 2, 3, 4, or 5 amino acids changed from the recited sequence. In some embodiments, each CDR can have a sequence at least 80%, 85%, 90%, 95%, 99%, or 100% identical to those depicted in FIGS. 8-13. In some embodiments, each CDR can have a sequence at least 80%, 85%, 90%, 95%, 99%, or 100% similar to those depicted in FIGS. 8-13. In some embodiments, the anti-Gal3 antibody comprises a V_{H} having a sequence at least 80%, 85%, 90%, 95%, 99%, or 100% identical to that of SEQ ID NO: 298. In some embodiments, the anti-Gal3 antibody comprises a V_{H} having a sequence at least 80%, 85%, 90%, 95%, 99%, or 100% similar to that of SEQ ID NO: 298. In some embodiments, the anti-Gal3 antibody comprises a V_{L} having a sequence at least 80%, 85%, 90%, 95%, 99%, or 100% identical to that of SEQ ID NO: 375. In some embodiments, the anti-Gal3 antibody comprises a V_{L} having a sequence at least 80%, 85%, 90%, 95%, 99%, or 100% similar to that of SEQ ID NO: 375. The pharmaceutical antibody formulations may comprise one or more excipients. In some embodiments, the one or more excipients are present in amounts that are optimized for a certain disease or disorder, to improve stability and/or biocompatibility when administered to a subject. In some embodiments, the one or more excipients may be present in a concentration that is at least 1, 2, 3, 4, 5, 6, 7, 8, 9, 10, 11, 12, 13, 14, 15, 16, 17, 18, 19, 20, 21, 22, 23, 24, 25, 26, 27, 28, 29, 30, 31, 32, 33, 34, 35, 36, 37, 38, 39, 40, 41, 42, 43, 44, 45, 46, 47, 48, 49, 50, 51, 52, 53, 54, 55, 56, 57, 58, 59, 60, 61, 62, 63, 64, 65, 66, 67, 68, 69, 70, 71, 72, 73, 74, 75, 76, 77, 78, 79, 80, 81, 82, 83, 84, 85, 86, 87, 88, 89, 90, 91, 92, 93, 94, 95, 96, 97, 98, 99, 100, 101, 102, 103, 104, 105, 106, 107, 108, 109, 110, 111, 112, 113, 114, 115, 116, 117, 118, 119, 120, 121, 122, 123, 124, 125, 126, 127, 128, 129, 130, 131, 132, 133, 134, 135, 136, 137, 138, 139, 140, 141, 142, 143, 144, 145, 146, 147, 148, 149, 150, 151, 152, 153, 154, 155, 156, 157, 158, 159, 160, 161, 162, 163, 164, 165, 166, 167, 168, 169, 170, 171, 172, 173, 174, 175, 176, 177, 178, 179, 180, 181, 182, 183, 184, 185, 186, 187, 188, 189, 190, 191, 192, 193, 194, 195, 196, 197, 198, 199, or 200 mM, or any concentration within a range defined by any two of the aforementioned concentrations. The one or more excipient may also be present in a concentration that is at least 0.01%, 0.02%, 0.03%, 0.04%, 0.05%, 0.06%, 0.07%, 0.08%, 0.09%, 0.1%, 0.2%, 0.3%, 0.4%, 0.5%, 0.6%, 0.7%, 0.8%, 0.9%, 1%, 2%, 3%, 4%, 5%, 6%, 7%, 8%, 9%, 10%, 11%, 12%, 13%, 14%, 15%, 16%, 17%, 18%, 19%, or 20%, or any combination within a range within any two of the aforementioned concentrations. In some embodiments, the pharmaceutical antibody formulations further comprise one or more amino acids, one or more salts, or one or more surfactants (which may make up the one or more excipients). The one or more amino acids, one or more salts, and one or more surfactants may be any one of the amino acids, salts, and surfactants disclosed herein. In some embodiments, the one or more amino acids are present at 10 to 50 mM or about 10 to about 50 mM. In some embodiments, the one or more amino acids are present at 20 mM or about 20 mM. In some embodiments, the one or more salts are present at 50 to 150 mM or about 50 to about 150 mM. In some embodiments, the one or more salts are present at 100 mM or about 100 mM. In some embodiments, the one or more surfactants are present at 0.01% to 0.04% or about 0.01% to about 0.04%. In some embodiments, the one or more surfactants are present at 0.02% or about 0.02%. In some embodiments, the formulation is at a pH between 5.3 and 6.3. In some embodiments, the formulation is at a pH of 5.8 or about 5.8. In some embodiments, the antibodies comprise one or more sequences having at least 80%, 81%, 82%, 83%, 84%, 85%, 86%, 87%, 88%, 89%, 90%, 91%, 92%, 93%, 94%, 95%, 96%, 97%, 98%, 99%, or 100% identity to a VL sequence, a VH sequence, a VL/VH pairing, and/or V_{L}-CDR1, V_{L}-CDR2, V_{L}-CDR3, V_{H}-CDR1, V_{H}-CDR2, V_{H}-CDR3 (including 1, 2, 3, 4, or 5 amino acid substitutions of any one or more of these CDRs) set from the heavy chain and light chain sequences as depicted in FIG. 18.

[0191] In some embodiments, the pharmaceutical antibody formulations comprise an antibody. In some embodiments, the antibody is an anti-Gal3 antibody. In some embodiments, the anti-Gal3 antibody is any one of the anti-Gal3 antibodies disclosed herein, or otherwise known in the art, such as those disclosed in WO 2020/160156. In some embodiments, the antibody comprises V_{H}-CDR1 having the sequence of SEQ ID NO: 31, a V_{H}-CDR2 having the sequence of SEQ ID NO: 72, a V_{H}-CDR3 having the sequence of SEQ ID NO: 113, a V_{L}-CDR1 having the sequence of SEQ ID NO: 171, a V_{L}-CDR2 having the sequence of SEQ ID NO: 222; and a V_{L}-CDR3 having the sequence of SEQ ID NO: 249. In some embodiments, exemplary CDR sequences are depicted in FIGS. 8-13. In some embodiments, each CDR can have up to 1, 2, 3, 4, or 5 amino acids changed from the recited sequence. In some embodiments, the anti-Gal3 antibody comprises a V_{H} having a sequence at least 80%, 85%, 90%, 95%, 99%, or 100% identical to that of SEQ ID NO: 298. In some embodiments, the anti-Gal3 antibody comprises a V_{H} having a sequence at least 80%, 85%, 90%, 95%, 99%, or 100% similar to that of SEQ ID NO: 298. In some embodiments, the anti-Gal3 antibody comprises having a sequence at least 80%, 85%, 90%, 95%, 99%, or 100% identical to that of SEQ ID NO: 375. In some embodiments, the anti-Gal3 antibody comprises having a sequence at least 80%, 85%, 90%, 95%, 99%, or 100% similar to that of SEQ ID NO: 375. In some embodiments, the pharmaceutical antibody formulations further comprise one or more amino acids, one or more salts, or one or more surfactants. In some embodiments, the one or more amino acids comprise histidine and/or methionine, the one or more salts comprise sodium chloride (NaCl), the one or more surfactants comprise a polysorbate, or any combination thereof. In some embodiments, the pharmaceutical antibody formulations comprise histidine, methionine, NaCl, or polysorbate, or any combination thereof, including all of histidine, methionine, NaCl, and polysorbate. In some embodiments, the histidine may be L-histidine. In some embodiments, the L-histidine is present at 10 to 50 mM or about 10 to about 50 mM, or any amount or concentration envisioned herein. In some embodiments, the L-histidine is present at 20 mM or about 20 mM. In some embodiments, the methionine is present at 2 to 10 mM or about 2 to about 10 mM, or any amount or concentration envisioned herein. In some embodiments, the methionine is present at 5 mM or about 5 mM. In some embodiments, the NaCl is present at 50 to 150 mM or about 50 to about 150 mM, or any amount or concentration envisioned herein. In some embodiments, the NaCl is present at 100 mM or about 100 mM. In some embodiments, the polysorbate comprises polysorbate-20, polysorbate-40, polysorbate-60, polysorbate-80, or any combination thereof. In some embodiments, the polysorbate is or comprises polysorbate-80. In some embodiments, the polysorbate-80 is present at 0.01% to 0.04% or about 0.01% to about 0.04%, or any amount or concentration envisioned herein. In some embodiments, the polysorbate-80 is present at 0.02% or about 0.02%. In some embodiments, the formulation is at a pH between 5.3 and 6.3. In some embodiments, the formulation is at a pH of 5.8 or about 5.8. In some embodiments, the antibodies comprise one or more sequences having at least 80%, 81%, 82%, 83%, 84%, 85%, 86%, 87%, 88%, 89%, 90%, 91%, 92%, 93%, 94%, 95%, 96%, 97%, 98%, 99%, or 100% identity to a VL sequence, a VH sequence, a VL/VH pairing, and/or V_{L}-CDR1, V_{L}-CDR2, V_{L}-CDR3, V_{H}-CDR1, V_{H}-CDR2, V_{H}-CDR3 (including 1, 2, 3, 4, or 5 amino acid substitutions of any one or more of these CDRs) set from the heavy chain and light chain sequences as depicted in FIG. 18.

[0192] In some embodiments, the formulation includes one or more of: Polysorbate 80, Polysorbate 20, Poloxamer 188, Mannitol, Sorbitol, Sucrose, Trehalose, Dextrose, Dextran 40, NaCl, Arginine, Glycine, Methionine, Ascorbic acid, NaOAc, Phosphate, Citrate, Acetate, Tris, Succinate, Histidine.

[0193] In some embodiments, pharmaceutical antibody formulations are provided. The formulations can include a therapeutically effective amount of an antibody, where the antibody comprises a V_{H}-CDR1 having the sequence of SEQ ID NO: 31, a V_{H}-CDR2 having the sequence of SEQ ID NO: 72, a V_{H}-CDR3 having the sequence of SEQ ID NO: 113, a V_{L}-CDR1 having the sequence of SEQ ID NO: 171, a V_{L}-CDR2 having the sequence of SEQ ID NO: 222; and a V_{L}-CDR3 having the sequence of SEQ ID NO: 249, histidine, methionine, NaCl, and polysorbate. In some embodiments, the formulation can be at a pH between 5.3 and 6.3, which may or may not be accomplished by the addition of the histidine, methionine, NaCl, and/or polysorbate. In some embodiments, the antibody comprises a heavy chain variable domain (V_{H}) region having a sequence at least 80%, 85%, 90%, 95%, 99%, or 100% identical to that of SEQ ID NO: 298. In some embodiments, the antibody comprises a heavy chain variable domain (V_{H}) region having a sequence at least 80%, 85%, 90%, 95%, 99%, or 100% similar to that of SEQ ID NO: 298. In some embodiments, the antibody comprises a light chain variable domain (V_{L}) region having a sequence at least 80%, 85%, 90%, 95%, 99%, or 100% identical to that of SEQ ID NO: 375. In some embodiments, the antibody comprises a light chain variable domain (V_{L}) region having a sequence at least 80%, 85%, 90%, 95%, 99%, or 100% similar to that of SEQ ID NO: 375. In some embodiments, the formulation can also include additional ingredients and/or excipients to those listed, or exclude one or more of the positively recited options. In some embodiments, the ingredients and/or excipients can be replaced or used additionally with one or more alternatives that function to achieve the same result. In some embodiments, the histidine can be replaced with an alternative buffer with an appropriate pKa. In some embodiments, the histidine can be replaced with an alternative that has the same buffer capacity. In some embodiments, the histidine can be replaced with another amino acid. In some embodiments, the histidine can be replaced with an alternative that exhibits the same or similar antibody protective effects. In some embodiments, the histidine can be replaced with an alternative that exhibits the same or similar capacity to reduce aggregation of the antibody. In some embodiments, the histidine can be replaced with an alternative that has the same or similar cryoprotective capabilities. In some embodiments, the methionine can be replaced with an alternative buffer with an appropriate pKa. In some embodiments, the methionine can be replaced with an alternative that has the same buffer capacity. In some embodiments, the methionine can be replaced with another amino acid. In some embodiments, the methionine can be replaced with an alternative that has the same or similar antioxidant effects. In some embodiments, the methionine can be replaced with an alternative that has the same antibody protective effects. In some embodiments, the methionine can be replaced by an alternative that has the same or similar protein stabilization effects. In some embodiments, the methionine can be replaced by an alternative that exhibits the same or similar capacity to reduce aggregation of the antibody, including alternatives that may exhibit any one or more of the properties provided herein. The alternatives for histidine and/or methionine may be any of those provided herein, such as arginine or glycine, or otherwise known in the art. In some embodiments, the NaCl can be replaced with another salt. In some embodiments, the NaCl can be replaced with an alternative that has the same or similar aqueous solubility. In some embodiments, the NaCl can be replaced with an alternative that has the same or similar effect on formulation isotonicity. In some embodiments, the NaCl can be replaced with an alternative that has the same or similar protein stabilization effects, including alternatives that may exhibit any one or more of the properties provided herein. The alternative for NaCl may be any of those provided herein, such as other chloride salts, other sodium salts, ascorbate salts, acetate salts, phosphate salts, citrate salts, Tris salts, or succinate salts, or otherwise known in the art. In some embodiments, the polysorbate can be replaced with another surfactant and/or detergent. In some embodiments, the polysorbate can be replaced with an alternative that has the same or similar surfactant ability/effect. In some embodiments, the polysorbate can be replaced with an alternative that has the same or similar capability for solubilizing antibodies and/or other excipients. In some embodiments, the polysorbate can be replaced with an alternative that has the same or similar capacity to reduce aggregation of the antibody. In some embodiments, the polysorbate can be replaced with an alternative that has the same or similar protein stabilization effects, including alternatives that may exhibit any one or more of the properties provided herein. The alternative for polysorbate may be any of those provided herein, such as poloxamer 188, or otherwise known in the art. In some embodiments, the pH can be acidic, basic, or neutral. In some embodiments, the pH can be basic. In some embodiments, the pH can be varied. In some embodiments, the pH can be increased or decreased in line with the ingredients, excipients, and/or buffers used in the formulation and the particulars of the antibody species used and/or the amount of antibody, ingredients, or excipients used. In some embodiments, the pH can be increased or decreased to a desired pH after adding the antibody, ingredients, or excipients. The alternatives contemplated herein may be any one or more of the excipients, diluents, salts, buffers, and the like, provided throughout the disclosure.

[0194] For any of the embodiments of the pharmaceutical antibody formulations provided herein, the histidine is L-histidine, D-histidine, or racemic histidine. For any of the embodiments of the pharmaceutical antibody formulations provided herein, the histidine is racemic histidine. For any of the embodiments of the pharmaceutical antibody formulations provided herein, the histidine is D-histidine. In some embodiments, the histidine can be replaced with an alternative buffer with an appropriate pKa. In some embodiments, the histidine can be replaced with an alternative that has the same buffer capacity. In some embodiments, the histidine can be replaced with another amino acid. In some embodiments, the histidine can be replaced with an alternative that exhibits the same or similar antibody protective effects. In some embodiments, the histidine can be replaced with an alternative that exhibits the same or similar capacity to reduce aggregation of the antibody. In some embodiments, the histidine can be replaced with an alternative that has the same or similar cryoprotective capabilities, including alternatives that may exhibit any one or more of the properties provided herein. The alternatives for histidine may be any of those provided herein, such as arginine or glycine, or otherwise known in the art.

[0195] For any of the embodiments of the pharmaceutical antibody formulations provided herein, the histidine may be present in a concentration that is at least 1, 2, 3, 4, 5, 6, 7, 8, 9, 10, 11, 12, 13, 14, 15, 16, 17, 18, 19, 20, 21, 22, 23, 24, 25, 26, 27, 28, 29, 30, 31, 32, 33, 34, 35, 36, 37, 38, 39, 40, 41, 42, 43, 44, 45, 46, 47, 48, 49, 50, 51, 52, 53, 54, 55, 56, 57, 58, 59, 60, 61, 62, 63, 64, 65, 66, 67, 68, 69, 70, 71, 72, 73, 74, 75, 76, 77, 78, 79, 80, 81, 82, 83, 84, 85, 86, 87, 88, 89, 90, 91, 92, 93, 94, 95, 96, 97, 98, 99, 100, 101, 102, 103, 104, 105, 106, 107, 108, 109, 110, 111, 112, 113, 114, 115, 116, 117, 118, 119, 120, 121, 122, 123, 124, 125, 126, 127, 128, 129, 130, 131, 132, 133, 134, 135, 136, 137, 138, 139, 140, 141, 142, 143, 144, 145, 146, 147, 148, 149, 150, 151, 152, 153, 154, 155, 156, 157, 158, 159, 160, 161, 162, 163, 164, 165, 166, 167, 168, 169, 170, 171, 172, 173, 174, 175, 176, 177, 178, 179, 180, 181, 182, 183, 184, 185, 186, 187, 188, 189, 190, 191, 192, 193, 194, 195, 196, 197, 198, 199, or 200 mM, or any concentration within a range defined by any two of the aforementioned concentrations. In some embodiments, the histidine is present at 10 to 50 mM, e.g. 10, 15, 20, 25, 30, 35, 40, 45, or 50 mM. In some embodiments, the histidine is present at 20 mM or about 20 mM. In some embodiments, where the histidine is L-histidine, the L-histidine is present at 10 to 50 mM, e.g. 10, 15, 20, 25, 30, 35, 40, 45, or 50 mM. In some embodiments, where the histidine is L-histidine, the L-histidine is present at 20 mM or about 20 mM.

[0196] For any of the embodiments of the pharmaceutical antibody formulations provided herein, the methionine is L-methionine, D-methionine, or racemic methionine. For any of the embodiments of the pharmaceutical antibody formulations provided herein, the methionine is racemic methionine. For any of the embodiments of the pharmaceutical antibody formulations provided herein, the methionine is D-methionine. In some embodiments, the methionine can be replaced with an alternative buffer with an appropriate pKa. In some embodiments, the methionine can be replaced with an alternative that has the same buffer capacity. In some embodiments, the methionine can be replaced with another amino acid. In some embodiments, the methionine can be replaced with an alternative that has the same or similar antioxidant effects. In some embodiments, the methionine can be replaced with an alternative that has the same antibody protective effects. In some embodiments, the methionine can be replaced by an alternative that has the same or similar protein stabilization effects. In some embodiments, the methionine can be replaced by an alternative that exhibits the same or similar capacity to reduce aggregation of the antibody, including alternatives that may exhibit any one or more of the properties provided herein. The alternatives for methionine may be any of those provided herein, such as arginine or glycine, or otherwise known in the art.

[0197] For any of the embodiments of the pharmaceutical antibody formulations provided herein, the methionine may be present in a concentration that is at least 1, 2, 3, 4, 5, 6, 7, 8, 9, 10, 11, 12, 13, 14, 15, 16, 17, 18, 19, 20, 21, 22, 23, 24, 25, 26, 27, 28, 29, 30, 31, 32, 33, 34, 35, 36, 37, 38, 39, 40, 41, 42, 43, 44, 45, 46, 47, 48, 49, 50, 51, 52, 53, 54, 55, 56, 57, 58, 59, 60, 61, 62, 63, 64, 65, 66, 67, 68, 69, 70, 71, 72, 73, 74, 75, 76, 77, 78, 79, 80, 81, 82, 83, 84, 85, 86, 87, 88, 89, 90, 91, 92, 93, 94, 95, 96, 97, 98, 99, 100, 101, 102, 103, 104, 105, 106, 107, 108, 109, 110, 111, 112, 113, 114, 115, 116, 117, 118, 119, 120, 121, 122, 123, 124, 125, 126, 127, 128, 129, 130, 131, 132, 133, 134, 135, 136, 137, 138, 139, 140, 141, 142, 143, 144, 145, 146, 147, 148, 149, 150, 151, 152, 153, 154, 155, 156, 157, 158, 159, 160, 161, 162, 163, 164, 165, 166, 167, 168, 169, 170, 171, 172, 173, 174, 175, 176, 177, 178, 179, 180, 181, 182, 183, 184, 185, 186, 187, 188, 189, 190, 191, 192, 193, 194, 195, 196, 197, 198, 199, or 200 mM, or any concentration within a range defined by any two of the aforementioned concentrations. In some embodiments, the methionine is present at 2 to 10 mM, e.g. 2, 3, 4, 5, 6, 7, 8, 9, or 10 mM. In some embodiments, the methionine is present at 5 mM or about 5 mM.

[0198] For any of the embodiments of the pharmaceutical antibody formulations provided herein, the NaCl may be present in a concentration that is at least 1, 2, 3, 4, 5, 6, 7, 8, 9, 10, 11, 12, 13, 14, 15, 16, 17, 18, 19, 20, 21, 22, 23, 24, 25, 26, 27, 28, 29, 30, 31, 32, 33, 34, 35, 36, 37, 38, 39, 40, 41, 42, 43, 44, 45, 46, 47, 48, 49, 50, 51, 52, 53, 54, 55, 56, 57, 58, 59, 60, 61, 62, 63, 64, 65, 66, 67, 68, 69, 70, 71, 72, 73, 74, 75, 76, 77, 78, 79, 80, 81, 82, 83, 84, 85, 86, 87, 88, 89, 90, 91, 92, 93, 94, 95, 96, 97, 98, 99, 100, 101, 102, 103, 104, 105, 106, 107, 108, 109, 110, 111, 112, 113, 114, 115, 116, 117, 118, 119, 120, 121, 122, 123, 124, 125, 126, 127, 128, 129, 130, 131, 132, 133, 134, 135, 136, 137, 138, 139, 140, 141, 142, 143, 144, 145, 146, 147, 148, 149, 150, 151, 152, 153, 154, 155, 156, 157, 158, 159, 160, 161, 162, 163, 164, 165, 166, 167, 168, 169, 170, 171, 172, 173, 174, 175, 176, 177, 178, 179, 180, 181, 182, 183, 184, 185, 186, 187, 188, 189, 190, 191, 192, 193, 194, 195, 196, 197, 198, 199, or 200 mM, or any concentration within a range defined by any two of the aforementioned concentrations. In some embodiments, the NaCl is present at 50 to 150 mM, e.g. 50, 60, 70, 80, 90, 100, 110, 120, 130, 140, or 150 mM. In some embodiments, the NaCl is present at 100 mM. In some embodiments, the NaCl can be replaced with another salt. In some embodiments, the NaCl can be replaced with an alternative that has the same or similar aqueous solubility. In some embodiments, the NaCl can be replaced with an alternative that has the same or similar effect on formulation isotonicity. In some embodiments, the NaCl can be replaced with an alternative that has the same or similar protein stabilization effects, including alternatives that may exhibit any one or more of the properties provided herein. The alternative for NaCl may be any of those provided herein, such as other chloride salts, other sodium salts, ascorbate salts, acetate salts, phosphate salts, citrate salts, Tris salts, or succinate salts, or otherwise known in the art.

[0199] For any of the embodiments of the pharmaceutical antibody formulations provided herein, the polysorbate comprises polysorbate 20, polysorbate 40, polysorbate 60, polysorbate 80, or any combination thereof. In some embodiments, the polysorbate comprises, consists essentially of, or consists of polysorbate 80. In some embodiments, the polysorbate may be present in a concentration that is at least 0.01%, 0.02%, 0.03%, 0.04%, 0.05%, 0.06%, 0.07%, 0.08%, 0.09%, 0.1%, 0.2%, 0.3%, 0.4%, 0.5%, 0.6%, 0.7%, 0.8%, 0.9%, 1%, 2%, 3%, 4%, 5%, 6%, 7%, 8%, 9%, 10%, 11%, 12%, 13%, 14%, 15%, 16%, 17%, 18%, 19%, or 20%, or any combination within a range within any two of the aforementioned concentrations. In some embodiments, the polysorbate is present at 0.01% to 0.04%, e.g. 0.01%, 0.02%, 0.03%, or 0.04%. In some embodiments, the polysorbate is present at about 0.01% to about 0.04%, e.g. about 0.01%, about 0.02%, about 0.03%, or about 0.04%. In some embodiments, the polysorbate is present at 0.02% or about 0.02%. In some embodiments, where the polysorbate is polysorbate 80, the polysorbate 80 is present at 0.01% to 0.04%, e.g. 0.01%, 0.02%, 0.03%, or 0.04%. In some embodiments, where the polysorbate is polysorbate 80, the polysorbate 80 is present at about 0.01% to about 0.04%, e.g. about 0.01%, about 0.02%, about 0.03%, or about 0.04%. In some embodiments, the polysorbate 80 is present at 0.02% or about 0.02%. In some embodiments, the polysorbate can be replaced with another surfactant and/or detergent. In some embodiments, the polysorbate can be replaced with an alternative that has the same or similar surfactant ability/effect. In some embodiments, the polysorbate can be replaced with an alternative that has the same or similar capability for solubilizing antibodies and/or other excipients. In some embodiments, the polysorbate can be replaced with an alternative that has the same or similar capacity to reduce aggregation of the antibody. In some embodiments, the polysorbate can be replaced with an alternative that has the same or similar protein stabilization effects, including alternatives that may exhibit any one or more of the properties provided herein. The alternative for polysorbate may be any of those provided herein, such as poloxamer 188, or otherwise known in the art.

[0200] For any of the embodiments of the pharmaceutical antibody formulations provided herein, the pH is about 5.3, 5.4, 5.5, 5.6, 5.7, 5.8, 5.9, 6.0, 6.1, 6.2, or 6.3. In some embodiments, the pH is about 5.8. In some embodiments, the pH is 5.8. In some embodiments, the pH can be acidic, basic, or neutral. In some embodiments, the pH can be varied. In some embodiments, the pH can be increased or decreased in line with the ingredients, excipients, and/or buffers used in the formulation and the particulars of the antibody species used and/or the amount of antibody, ingredients, or excipients used. In some embodiments, the pH can be increased or decreased to a desired pH after adding the antibody, ingredients, or excipients.

[0201] For any of the embodiments of the pharmaceutical antibody formulations provided herein, the formulations further comprise one or more sugars or one or more sugar alcohols, or both, such as the sugars or sugar alcohols disclosed herein or otherwise known in the art. In some embodiments, the one or more sugars comprises sucrose. In some embodiments, the one or more sugar alcohols comprise mannitol. In some embodiments, the formulations comprise sucrose or mannitol, or both. In some embodiments, the formulations comprise sucrose and mannitol. In some embodiments, the sucrose and/or mannitol can be replaced with another sugar and/or sugar alcohol. In some embodiments, the sucrose and/or mannitol can be replaced with an alternative that has the same or similar antibody protective effects. In some embodiments, the sucrose and/or mannitol can be replaced with an alternative that exhibits the same or similar capacity to reduce aggregation of the antibody. In some embodiments, the sucrose and/or mannitol can be replaced with an alternative that has the same or similar cryoprotective capabilities. In some embodiments, the sucrose and/or mannitol can be replaced with an alternative that have the same effect on isotonicity, including alternatives that may exhibit any one or more of the properties provided herein. The alternative for sucrose and/or mannitol may be any of those provided herein, such as sorbitol, trehalose, dextrose, dextran, or dextran 40, or otherwise known in the art.

[0202] In some embodiments, the one or more sugars or one or more sugar alcohols may be present in a concentration that is at least 0.01%, 0.02%, 0.03%, 0.04%, 0.05%, 0.06%, 0.07%, 0.08%, 0.09%, 0.1%, 0.2%, 0.3%, 0.4%, 0.5%, 0.6%, 0.7%, 0.8%, 0.9%, 1%, 2%, 3%, 4%, 5%, 6%, 7%, 8%, 9%, 10%, 11%, 12%, 13%, 14%, 15%, 16%, 17%, 18%, 19%, or 20%, or any combination within a range within any two of the aforementioned concentrations. In some embodiments, the one or more sugars or one or more sugar alcohols are present at 2% to 5%, e.g. 2%, 3%, 4%, or 5%. In some embodiments, the one or more sugars or one or more sugar alcohols are present at about 2% to about 5%, e.g. about 2%, about 3%, about 4%, or about 5%. In some embodiments where the sugar is sucrose, the sucrose is present at 2% to 5% or about 2% to 5%. In some embodiments where the sugar alcohol is mannitol, the mannitol is present at 2% to 5% or about 2% to 5%.

[0203] For any of the embodiments of the pharmaceutical antibody formulations provided herein, the formulation is configured for parenteral administration. In some embodiments, the formulation is configured for subcutaneous administration. In embodiments where the formulation is configured for subcutaneous administration, the formulation may comprise one or more sugars and/or one or more sugar alcohols. In some embodiments, the formulation configured for subcutaneous administration comprises sucrose or mannitol, or both. In some embodiments, the formulation is configured for intravenous administration. In embodiments where the formulation is configured for intravenous administration, the formulation may not comprise one or more sugars and/or one or more sugar alcohols. In some embodiments, the formulation configured for intravenous administration does not comprise sucrose or mannitol, or both.

[0204] For any of the embodiments of the pharmaceutical antibody formulations provided herein, the antibody may be present at an amount that is or is about 1, 2, 3, 4, 5, 6, 7, 8, 9, 10, 11, 12, 13, 14, 15, 16, 17, 18, 19, 20, 21, 22, 23, 24, 25, 26, 27, 28, 29, 30, 31, 32, 33, 34, 35, 36, 37, 38, 39, 40, 41, 42, 43, 44, 45, 46, 47, 48, 49, 50, 51, 52, 53, 54, 55, 56, 57, 58, 59, or 60 mg as a unit dose, or any amount within a range defined by any two of the aforementioned amounts. In some embodiments, the antibody is present at an amount of 1 to 50 mg as a unit dose. In some embodiments, the antibody is present at an amount of one of: 1 mg, 5 mg, 10 mg, 20 mg, 40 mg, or 50 mg as a unit dose, or any amount within a range defined by any two of the aforementioned amounts. In some embodiments, the antibody is present at an amount of 1 mg. In some embodiments, the antibody is present at an amount of 5 mg. In some embodiments, the antibody is present at an amount of 10 mg. In some embodiments, the antibody is present at an amount of 20 mg. In some embodiments, the antibody is present at an amount of 40 mg. In some embodiments, the antibody is present at an amount of 50 mg. In some embodiments, the antibody is present in the formulation at a concentration of one of: 1 mg/mL, 5 mg/mL, 10 mg/mL, 20 mg/mL, 40 mg/mL, or 50 mg/mL, or any concentration within a range defined by any two of the aforementioned concentrations. In some embodiments, the antibody is present at a concentration of 1 mg/mL. In some embodiments, the antibody is present at a concentration of 5 mg/mL. In some embodiments, the antibody is present at a concentration of 10 mg/mL. In some embodiments, the antibody is present at a concentration of 20 mg/mL. In some embodiments, the antibody is present at a concentration of 40 mg/mL. In some embodiments, the antibody is present at a concentration of 50 mg/mL.

[0205] In some embodiments of the pharmaceutical antibody formulations, L-histidine is present at about 20 mM, methionine is present at about 5 mM, NaCl is present at about 100 mM, polysorbate 80 is present at about 0.02%, sucrose is present at 2-5%, mannitol is present at 2-5%, the pH of the formulation is about 5.8, and the therapeutically effective amount of the antibody is one of: 1 mg, 5 mg, 10 mg, 20 mg, 40 mg, or 50 mg as a unit dose, or any amount within a range defined by any two of the aforementioned amounts. In some embodiments of the pharmaceutical antibody formulations, L-histidine is present at about 20 mM, methionine is present at about 5 mM, NaCl is present at about 100 mM, polysorbate 80 is present at about 0.02%, sucrose is present at 2-5%, mannitol is present at 2-5%, the pH of the formulation is about 5.8, and the therapeutically effective amount of the antibody is 1 mg as a unit dose. In some embodiments of the pharmaceutical antibody formulations, L-histidine is present at about 20 mM, methionine is present at about 5 mM, NaCl is present at about 100 mM, polysorbate 80 is present at about 0.02%, sucrose is present at 2-5%, mannitol is present at 2-5%, the pH of the formulation is about 5.8, and the therapeutically effective amount of the antibody is 5 mg as a unit dose. In some embodiments of the pharmaceutical antibody formulations, L-histidine is present at about 20 mM, methionine is present at about 5 mM, NaCl is present at about 100 mM, polysorbate 80 is present at about 0.02%, sucrose is present at 2-5%, mannitol is present at 2-5%, the pH of the formulation is about 5.8, and the therapeutically effective amount of the antibody is 10 mg as a unit dose. In some embodiments of the pharmaceutical antibody formulations, L-histidine is present at about 20 mM, methionine is present at about 5 mM, NaCl is present at about 100 mM, polysorbate 80 is present at about 0.02%, sucrose is present at 2-5%, mannitol is present at 2-5%, the pH of the formulation is about 5.8, and the therapeutically effective amount of the antibody is 20 mg as a unit dose. In some embodiments of the pharmaceutical antibody formulations, L-histidine is present at about 20 mM, methionine is present at about 5 mM, NaCl is present at about 100 mM, polysorbate 80 is present at about 0.02%, sucrose is present at 2-5%, mannitol is present at 2-5%, the pH of the formulation is about 5.8, and the therapeutically effective amount of the antibody is 40 mg as a unit dose. In some embodiments of the pharmaceutical antibody formulations, L-histidine is present at about 20 mM, methionine is present at about 5 mM, NaCl is present at about 100 mM, polysorbate 80 is present at about 0.02%, sucrose is present at 2-5%, mannitol is present at 2-5%, the pH of the formulation is about 5.8, and the therapeutically effective amount of the antibody is 50 mg as a unit dose.

[0206] In some embodiments, the pharmaceutical antibody formulation comprises a therapeutically effective amount of an antibody. In some embodiments, the antibody comprises a V_{H}-CDR1 having the sequence of SEQ ID NO: 31, a V_{H}-CDR2 having the sequence of SEQ ID NO: 72, a V_{H}-CDR3 having the sequence of SEQ ID NO: 113, a V_{L}-CDR1 having the sequence of SEQ ID NO: 171, a V_{L}-CDR2 having the sequence of SEQ ID NO: 222; and a V_{L}-CDR3 having the sequence of SEQ ID NO: 249. In some embodiments, the antibody is present at an amount as a unit dose of: 1 mg, 5 mg, 10 mg, 20 mg, 40 mg, or 50 mg, or any amount as a unit dose within a range defined by any two of the aforementioned amounts. In some embodiments, the antibody is present at an amount of 1 mg. In some embodiments, the antibody is present at an amount of 5 mg. In some embodiments, the antibody is present at an amount of 10 mg. In some embodiments, the antibody is present at an amount of 20 mg. In some embodiments, the antibody is present at an amount of 40 mg. In some embodiments, the antibody is present at an amount of 50 mg. In some embodiments, the pharmaceutical antibody formulation further comprises L-histidine present at 20 mM, methionine present at 5 mM, NaCl present at 100 mM, polysorbate 80 present at 0.02%. In some embodiments, the pH of the formulation is about 5.8. In some embodiments, the pharmaceutical antibody formulation further comprises sucrose and/or mannitol. In some embodiments, sucrose is present in the formulation at 2-5%. In some embodiments, mannitol is present in the formulation at 2-5%.

[0207] In some embodiments of the pharmaceutical antibody formulations disclosed herein, the formulation is configured for parenteral administration. In some embodiments, the formulation is configured for subcutaneous administration. In some embodiments, the formulation configured for subcutaneous administration comprises sucrose or mannitol, or both. In some embodiments, the formulation is configured for intravenous administration. In some embodiments, the formulation configured for intravenous administration does not comprise sucrose or mannitol, or both.

[0208] As applied to any of the embodiments of the pharmaceutical antibody formulations disclosed herein, the pharmaceutical antibody formulation is prepared at a concentration of antibody that is or is about 1, 2, 3, 4, 5, 6, 7, 8, 9, 10, 11, 12, 13, 14, 15, 16, 17, 18, 19, 20, 21, 22, 23, 24, 25, 26, 27, 28, 29, 30, 31, 32, 33, 34, 35, 36, 37, 38, 39, 40, 41, 42, 43, 44, 45, 46, 47, 48, 49, 50, 51, 52, 53, 54, 55, 56, 57, 58, 59, 60, 61, 62, 63, 64, 65, 66, 67, 68, 69, 70, 71, 72, 73, 74, 75, 76, 77, 78, 79, 80, 81, 82, 83, 84, 85, 86, 87, 88, 89, 90, 91, 92, 93, 94, 95, 96, 97, 98, 99, or 100 mg/mL, or any concentration within a range defined by any two of the aforementioned concentrations. In some embodiments, the pharmaceutical antibody formulation is prepared at a concentration of 0.3, 0.8, 2.8, 8.4, or 10 mg/mL, or about 0.3, about 0.8, about 2.8, about 8.4, or about 10 mg/mL. In some embodiments, the pharmaceutical antibody formulation is prepared at a concentration of 20 mg/mL or about 20 mg/mL. In some embodiments, the pharmaceutical antibody formulation is prepared at a concentration of 50 mg/mL or about 50 mg/mL.

[0209] As applied to any of the embodiments disclosed herein, the pharmaceutical antibody formulation remains at least 60%, 65%, 70%, 75%, 80%, 85%, 90%, 95%, 99%, or 100% stable over 3 months. In some embodiments, the pharmaceutical antibody formulation remains at least 60%, 65%, 70%, 75%, 80%, 85%, 90%, 95%, 99%, or 100% stable over 3 months at either 5° C. or 25° C./60% relative humidity (RH).

[0210] In some embodiments of the pharmaceutical antibody formulations disclosed herein, the antibody comprises a heavy chain variable domain (VH) region having a sequence at least 80%, 85%, 90%, 95%, 99%, or 100% identical to that of SEQ ID NO: 298. In some embodiments of the pharmaceutical antibody formulations disclosed herein, the antibody comprises a heavy chain variable domain (VH) region having a sequence at least 80%, 85%, 90%, 95%, 99%, or 100% similar to that of SEQ ID NO: 298. In some embodiments, the antibody comprises a light chain variable domain (VL) region having a sequence at least 80%, 85%, 90%, 95%, 99%, or 100% identical to that of SEQ ID NO: 375. In some embodiments, the antibody comprises a light chain variable domain (VL) region having a sequence at least 80%, 85%, 90%, 95%, 99%, or 100% similar to that of SEQ ID NO: 375. In some embodiments, the antibody comprises a VH region having a sequence at least 80%, 85%, 90%, 95%, 99%, or 100% identical to that of SEQ ID NO: 298, and wherein the antibody comprises a VL region having a sequence at least 80%, 85%, 90%, 95%, 99%, or 100% identical to that of SEQ ID NO: 375. In some embodiments, the antibody comprises a VH region having a sequence at least 80%, 85%, 90%, 95%, 99%, or 100% similar to that of SEQ ID NO: 298, and wherein the antibody comprises a VL region having a sequence at least 80%, 85%, 90%, 95%, 99%, or 100% similar to that of SEQ ID NO: 375. In some embodiments, the antibody comprises a VH region having a sequence of SEQ ID NO: 298. In some embodiments, the antibody comprises a VL region having a sequence of SEQ ID NO: 375. In some embodiments, the antibody comprises a VH region having a sequence of SEQ ID NO: 298, and wherein the antibody comprises a VL region having a sequence of SEQ ID NO: 375. In some embodiments, the antibody comprises a heavy chain (HC) having a sequence at least 80%, 85%, 90%, 95%, 99%, or 100% identical to that of SEQ ID NO: 449. In some embodiments, the antibody comprises a heavy chain (HC) having a sequence at least 80%, 85%, 90%, 95%, 99%, or 100% similar to that of SEQ ID NO: 449. In some embodiments, the antibody comprises a light chain (LC) having a sequence at least 80%, 85%, 90%, 95%, 99%, or 100% identical to that of SEQ ID NO: 496. In some embodiments, the antibody comprises a light chain (LC) having a sequence at least 80%, 85%, 90%, 95%, 99%, or 100% similar to that of SEQ ID NO: 496. In some embodiments, the antibody comprises an HC having a sequence of SEQ ID NO: 449. In some embodiments, the antibody comprises an LC having a sequence of SEQ ID NO: 496. In some embodiments, the antibody is TB006 (4A11.H3L1, IMT006a, IMT006-5). The % identity or % similarity of two sequences is well understood in the art and can be calculated by the number of conserved or similar amino acids or nucleotides relative to the length of the sequences.

[0211] In some embodiments of the pharmaceutical antibody formulations disclosed herein, the antibody or a component thereof is encoded by one or more nucleic acids. In some embodiments, the antibody comprises a VH that is encoded by a nucleic acid sequence having at least 80%, 85%, 90%, 95%, 99%, or 100% identical to that of SEQ ID NO: 540. In some embodiments, the antibody comprises a VL that is encoded by a nucleic acid sequence having at least 80%, 85%, 90%, 95%, 99%, or 100% identical to that of SEQ ID NO: 622. In some embodiments, the antibody comprises a VH that is encoded by a nucleic acid sequence of SEQ ID NO: 540. In some embodiments, the antibody comprises a VL that is encoded by a nucleic acid sequence of SEQ ID NO: 622. In some embodiments, the antibody comprises an HC that is encoded by a nucleic acid sequence having at least 80%, 85%, 90%, 95%, 99%, or 100% identical to that of SEQ ID NO: 704. In some embodiments, the antibody comprises an LC that is encoded by a nucleic acid sequence having at least 80%, 85%, 90%, 95%, 99%, or 100% identical to that of SEQ ID NO: 751. In some embodiments, the antibody comprises an HC that is encoded by a nucleic acid sequence of SEQ ID NO: 704. In some embodiments, the antibody comprises an LC that is encoded by a nucleic acid sequence of SEQ ID NO: 751. The % identity of two sequences is well understood in the art and can be calculated by the number of conserved amino acids or nucleotides relative to the length of the sequences.

[0212] In some embodiments, the pharmaceutical formulations include, but are not limited to, aqueous liquid dispersions, self-emulsifying dispersions, solid solutions, liposomal dispersions, aerosols, solid dosage forms, powders, immediate release formulations, controlled release formulations, fast melt formulations, tablets, capsules, pills, delayed release formulations, extended release formulations, pulsatile release formulations, multi-particulate formulations (e.g., nanoparticle formulations), and mixed immediate and controlled release formulations.

[0213] In some embodiments, the pharmaceutical formulations further include pH adjusting agents or buffering agents which include acids such as acetic, boric, citric, lactic, phosphoric and hydrochloric acids; bases such as sodium hydroxide, sodium phosphate, sodium borate, sodium citrate, sodium acetate, sodium lactate and tris-(hydroxymethyl)aminomethane; and buffers such as citrate/dextrose, sodium bicarbonate and ammonium chloride. Such acids, bases and buffers are included in an amount required to maintain pH of the formulation in an acceptable range.

[0214] In some embodiments, the pharmaceutical formulations include one or more salts in an amount required to bring osmolality of the formulation into an acceptable range. Such salts include those having sodium, potassium or ammonium cations and chloride, citrate, ascorbate, borate, phosphate, bicarbonate, sulfate, thiosulfate or bisulfite anions; suitable salts include sodium chloride, potassium chloride, sodium thiosulfate, sodium bisulfite and ammonium sulfate.

[0215] In some embodiments, the pharmaceutical formulations further include diluents which are used to stabilize compounds because they can provide a more stable environment. Salts dissolved in buffered solutions (which also can provide pH control or maintenance) are utilized as diluents in the art, including, but not limited to a phosphate buffered saline solution. In certain instances, diluents increase bulk of the formulation to facilitate compression or create sufficient bulk for homogenous blend for capsule filling. Such compounds can include e.g., lactose, starch, mannitol, sorbitol, dextrose, microcrystalline cellulose such as Avicel®; dibasic calcium phosphate, dicalcium phosphate dihydrate; tricalcium phosphate, calcium phosphate; anhydrous lactose, spray-dried lactose; pregelatinized starch, compressible sugar, such as Di-Pac® (Amstar); mannitol, hydroxypropylmethylcellulose, hydroxypropylmethylcellulose acetate stearate, sucrose-based diluents, confectioner's sugar; monobasic calcium sulfate monohydrate, calcium sulfate dihydrate; calcium lactate trihydrate, dextrates; hydrolyzed cereal solids, amylose; powdered cellulose, calcium carbonate; glycine, kaolin; mannitol, sodium chloride; inositol, bentonite, and the like.

[0216] In some embodiments, the pharmaceutical formulation is formulated for administration to a subject by one or more administration routes, including but not limited to, parenteral (e.g., intravenous, subcutaneous, intramuscular, intraarterial, intradermal, intraperitoneal, intravitreal, intracerebral, or intracerebroventricular), oral, intranasal, buccal, rectal, or transdermal administration routes. In some embodiments, the pharmaceutical formulation described herein is formulated for parenteral (e.g., intravenous, subcutaneous, intramuscular, intraarterial, intradermal, intraperitoneal, intravitreal, intracerebral, or intracerebroventricular) administration. In some embodiments, the pharmaceutical antibody formulation is formulated for intravenous administration. In some embodiments, the pharmaceutical antibody formulation is formulated for subcutaneous administration. Proper formulation is dependent upon the route of administration chosen. Techniques for formulation and administration of the compounds described herein are known to those skilled in the art.

[0217] In some embodiments, the pharmaceutical antibody formulation comprises a therapeutically effective amount of an antibody. In some embodiments, the antibody is an anti-Gal3 antibody.

[0218] In some embodiments, the pharmaceutical antibody formulation comprises a therapeutically effective amount of an antibody, histidine, methionine, NaCl, and polysorbate.

[0219] In some embodiments, the pharmaceutical antibody formulation comprises a therapeutically effective amount of an antibody, histidine, methionine, NaCl, and polysorbate, where the formulation is at a pH between 5.3 and 6.3.

[0220] In some embodiments, the pharmaceutical antibody formulation comprises a therapeutically effective amount of an antibody, histidine, methionine, NaCl, and polysorbate, where the formulation is at a pH between 5.3 and 6.3. In some embodiments, the histidine is L-histidine. In some embodiments, the polysorbate is polysorbate 80. In some embodiments, the histidine is L-histidine and the polysorbate is polysorbate 80. In some embodiments, the pharmaceutical antibody formulation comprises a therapeutically effective amount of an antibody, histidine, methionine, NaCl, and polysorbate, where the formulation is at a pH between 5.3 and 6.3, where the histidine is L-histidine. In some embodiments, the pharmaceutical antibody formulation comprises a therapeutically effective amount of an antibody, histidine, methionine, NaCl, and polysorbate, where the formulation is at a pH between 5.3 and 6.3, where the polysorbate is polysorbate 80. In some embodiments, the pharmaceutical antibody formulation comprises a therapeutically effective amount of an antibody, histidine, methionine, NaCl, and polysorbate, where the formulation is at a pH between 5.3 and 6.3, where the histidine is L-histidine and the polysorbate is polysorbate 80. In some embodiments, the antibody is an anti-Gal3 antibody.

[0221] In some embodiments, the pharmaceutical antibody formulation comprises a therapeutically effective amount of an antibody, histidine, methionine, NaCl, and polysorbate, where the formulation is at a pH between 5.3 and 6.3, where the histidine is present at 10 to 50 mM. In some embodiments, the pharmaceutical antibody formulation comprises a therapeutically effective amount of an antibody, histidine, methionine, NaCl, and polysorbate, where the formulation is at a pH between 5.3 and 6.3, where the histidine is present at 20 mM. In some embodiments, the pharmaceutical antibody formulation comprises a therapeutically effective amount of an antibody, histidine, methionine, NaCl, and polysorbate, where the formulation is at a pH between 5.3 and 6.3, where the methionine is present at 2 to 10 mM. In some embodiments, the pharmaceutical antibody formulation comprises a therapeutically effective amount of an antibody, histidine, methionine, NaCl, and polysorbate, where the formulation is at a pH between 5.3 and 6.3, where the methionine is present at 5 mM. In some embodiments, the pharmaceutical antibody formulation comprises a therapeutically effective amount of an antibody, histidine, methionine, NaCl, and polysorbate, where the formulation is at a pH between 5.3 and 6.3, where the NaCl is present at 50 to 150 mM. In some embodiments, the pharmaceutical antibody formulation comprises a therapeutically effective amount of an antibody, histidine, methionine, NaCl, and polysorbate, where the formulation is at a pH between 5.3 and 6.3, where the NaCl is present at 100 mM. In some embodiments, the pharmaceutical antibody formulation comprises a therapeutically effective amount of an antibody, histidine, methionine, NaCl, and polysorbate, where the formulation is at a pH between 5.3 and 6.3, where the polysorbate is present at 0.01 to 0.04%. In some embodiments, the pharmaceutical antibody formulation comprises a therapeutically effective amount of an antibody, histidine, methionine, NaCl, and polysorbate, where the formulation is at a pH between 5.3 and 6.3, where the polysorbate is present at 0.02%. In some embodiments, the histidine is L-histidine. In some embodiments, the polysorbate is polysorbate 20, polysorbate 40, polysorbate 60, or polysorbate 80. In some embodiments, the polysorbate is polysorbate 80. In some embodiments, the pH is 5.8. In some embodiments, the pharmaceutical antibody formulation further comprises sucrose. In some embodiments, the sucrose is present at 2% to 5%. In some embodiments, the pharmaceutical antibody formulation further comprises mannitol. In some embodiments, the mannitol is present at 2% to 5%. In some embodiments, the antibody is an anti-Gal3 antibody.

[0222] In some embodiments, the pharmaceutical antibody formulation comprises a therapeutically effective amount of an antibody, where the antibody comprises a V_{H}-CDR1 having the sequence of SEQ ID NO: 31, a V_{H}-CDR2 having the sequence of SEQ ID NO: 72, a V_{H}-CDR3 having the sequence of SEQ ID NO: 113, a V_{L}-CDR1 having the sequence of SEQ ID NO: 171, a V_{L}-CDR2 having the sequence of SEQ ID NO: 222; and a V_{L}-CDR3 having the sequence of SEQ ID NO: 249, histidine, methionine, NaCl, and polysorbate, where the formulation is at a pH between 5.3 and 6.3.

[0223] In some embodiments, the pharmaceutical antibody formulation comprises a therapeutically effective amount of an antibody, where the antibody comprises a V_{H}-CDR1 having the sequence of SEQ ID NO: 31, a V_{H}-CDR2 having the sequence of SEQ ID NO: 72, a V_{H}-CDR3 having the sequence of SEQ ID NO: 113, a V_{L}-CDR1 having the sequence of SEQ ID NO: 171, a V_{L}-CDR2 having the sequence of SEQ ID NO: 222; and a V_{L}-CDR3 having the sequence of SEQ ID NO: 249, histidine present at 20 mM, methionine present at 5 mM, NaCl present at 100 mM, and polysorbate present at 0.02%, where the formulation is at a pH between 5.3 and 6.3.

[0224] In some embodiments, the pharmaceutical antibody formulation comprises a therapeutically effective amount of an antibody, where the antibody comprises a V_{H}-CDR1 having the sequence of SEQ ID NO: 31, a V_{H}-CDR2 having the sequence of SEQ ID NO: 72, a V_{H}-CDR3 having the sequence of SEQ ID NO: 113, a V_{L}-CDR1 having the sequence of SEQ ID NO: 171, a V_{L}-CDR2 having the sequence of SEQ ID NO: 222; and a V_{L}-CDR3 having the sequence of SEQ ID NO: 249, histidine present at 20 mM, methionine present at 5 mM, NaCl present at 100 mM, and polysorbate present at 0.02%, where the formulation is at a pH of about 5.8.

[0225] In some embodiments, the pharmaceutical antibody formulation comprises a therapeutically effective amount of an antibody, where the antibody comprises a V_{H}-CDR1 having the sequence of SEQ ID NO: 31, a V_{H}-CDR2 having the sequence of SEQ ID NO: 72, a V_{H}-CDR3 having the sequence of SEQ ID NO: 113, a V_{L}-CDR1 having the sequence of SEQ ID NO: 171, a V_{L}-CDR2 having the sequence of SEQ ID NO: 222; and a V_{L}-CDR3 having the sequence of SEQ ID NO: 249, L-histidine present at 20 mM, methionine present at 5 mM, NaCl present at 100 mM, and polysorbate 80 present at 0.02%, where the formulation is at a pH between 5.3 and 6.3.

[0226] In some embodiments, the pharmaceutical antibody formulation comprises a therapeutically effective amount of an antibody, where the antibody comprises a V_{H}-CDR1 having the sequence of SEQ ID NO: 31, a V_{H}-CDR2 having the sequence of SEQ ID NO: 72, a V_{H}-CDR3 having the sequence of SEQ ID NO: 113, a V_{L}-CDR1 having the sequence of SEQ ID NO: 171, a V_{L}-CDR2 having the sequence of SEQ ID NO: 222; and a V_{L}-CDR3 having the sequence of SEQ ID NO: 249, L-histidine present at 20 mM, methionine present at 5 mM, NaCl present at 100 mM, and polysorbate 80 present at 0.02%, where the formulation is at a pH of about 5.8.

[0227] In some embodiments, the pharmaceutical antibody formulation comprises a therapeutically effective amount of an antibody, where the antibody comprises a V_{H}-CDR1 having the sequence of SEQ ID NO: 31, a V_{H}-CDR2 having the sequence of SEQ ID NO: 72, a V_{H}-CDR3 having the sequence of SEQ ID NO: 113, a V_{L}-CDR1 having the sequence of SEQ ID NO: 171, a V_{L}-CDR2 having the sequence of SEQ ID NO: 222; and a V_{L}-CDR3 having the sequence of SEQ ID NO: 249, where the antibody is present at an amount as a unit dose of 1 mg, 5 mg, 10 mg, 20 mg, 40 mg, or 40 mg, histidine present at 20 mM, methionine present at 5 mM, NaCl present at 100 mM, and polysorbate present at 0.02%, where the formulation is at a pH between 5.3 and 6.3.

[0228] In some embodiments, the pharmaceutical antibody formulation comprises a therapeutically effective amount of an antibody, where the antibody comprises a V_{H}-CDR1 having the sequence of SEQ ID NO: 31, a V_{H}-CDR2 having the sequence of SEQ ID NO: 72, a V_{H}-CDR3 having the sequence of SEQ ID NO: 113, a V_{L}-CDR1 having the sequence of SEQ ID NO: 171, a V_{L}-CDR2 having the sequence of SEQ ID NO: 222; and a V_{L}-CDR3 having the sequence of SEQ ID NO: 249, where the antibody is present at an amount as a unit dose of 1 mg, 5 mg, 10 mg, 20 mg, 40 mg, or 50 mg, histidine present at 20 mM, methionine present at 5 mM, NaCl present at 100 mM, and polysorbate present at 0.02%, where the formulation is at a pH of about 5.8.

[0229] In some embodiments, the pharmaceutical antibody formulation comprises a therapeutically effective amount of an antibody, where the antibody comprises a V_{H}-CDR1 having the sequence of SEQ ID NO: 31, a V_{H}-CDR2 having the sequence of SEQ ID NO: 72, a V_{H}-CDR3 having the sequence of SEQ ID NO: 113, a V_{L}-CDR1 having the sequence of SEQ ID NO: 171, a V_{L}-CDR2 having the sequence of SEQ ID NO: 222; and a V_{L}-CDR3 having the sequence of SEQ ID NO: 249, where the antibody is present at an amount as a unit dose of 1 mg, 5 mg, 10 mg, 20 mg, 40 mg, or 50 mg, L-histidine present at 20 mM, methionine present at 5 mM, NaCl present at 100 mM, and polysorbate 80 present at 0.02%, where the formulation is at a pH between 5.3 and 6.3.

[0230] In some embodiments, the pharmaceutical antibody formulation comprises a therapeutically effective amount of an antibody, where the antibody comprises a V_{H}-CDR1 having the sequence of SEQ ID NO: 31, a V_{H}-CDR2 having the sequence of SEQ ID NO: 72, a V_{H}-CDR3 having the sequence of SEQ ID NO: 113, a V_{L}-CDR1 having the sequence of SEQ ID NO: 171, a V_{L}-CDR2 having the sequence of SEQ ID NO: 222; and a V_{L}-CDR3 having the sequence of SEQ ID NO: 249, where the antibody is present at an amount as a unit dose of 1 mg, 50 mg, 10 mg, 20 mg, 40 mg, or 50 mg, L-histidine present at 20 mM, methionine present at 5 mM, NaCl present at 100 mM, and polysorbate 80 present at 0.02%, where the formulation is at a pH of about 5.8.

[0231] In some embodiments, the pharmaceutical antibody formulation comprises a therapeutically effective amount of an antibody, where the antibody comprises a VH region having a sequence at least 80%, 85%, 90%, 95%, 99%, or 100% identical to that of SEQ ID NO: 298 and a VL region having a sequence at least 80%, 85%, 90%, 95%, 99%, or 100% identical to that of SEQ ID NO: 375, where the antibody is present at an amount as a unit dose of 1 mg, 5 mg, 10 mg, 20 mg, 40 mg, or 50 mg, histidine present at 20 mM, methionine present at 5 mM, NaCl present at 100 mM, and polysorbate present at 0.02%, where the formulation is at a pH between 5.3 and 6.3.

[0232] In some embodiments, the pharmaceutical antibody formulation comprises a therapeutically effective amount of an antibody, where the antibody comprises a VH region having a sequence at least 80%, 85%, 90%, 95%, 99%, or 100% identical to that of SEQ ID NO: 298 and a VL region having a sequence at least 80%, 85%, 90%, 95%, 99%, or 100% identical to that of SEQ ID NO: 375, where the antibody is present at an amount as a unit dose of 1 mg, 5 mg, 10 mg, 20 mg, 40 mg, or 50 mg, histidine present at 20 mM, methionine present at 5 mM, NaCl present at 100 mM, and polysorbate present at 0.02%, where the formulation is at a pH of about 5.8.

[0233] In some embodiments, the pharmaceutical antibody formulation comprises a therapeutically effective amount of an antibody, where the antibody comprises a VH region having a sequence at least 80%, 85%, 90%, 95%, 99%, or 100% identical to that of SEQ ID NO: 298 and a VL region having a sequence at least 80%, 85%, 90%, 95%, 99%, or 100% identical to that of SEQ ID NO: 375, where the antibody is present at an amount as a unit dose of 1 mg, 5 mg, 10 mg, 20 mg, 40 mg, or 50 mg, L-histidine present at 20 mM, methionine present at 5 mM, NaCl present at 100 mM, and polysorbate 80 present at 0.02%, where the formulation is at a pH between 5.3 and 6.3.

[0234] In some embodiments, the pharmaceutical antibody formulation comprises a therapeutically effective amount of an antibody, where the antibody comprises a VH region having a sequence at least 80%, 85%, 90%, 95%, 99%, or 100% identical to that of SEQ ID NO: 298 and a VL region having a sequence at least 80%, 85%, 90%, 95%, 99%, or 100% identical to that of SEQ ID NO: 375, where the antibody is present at an amount as a unit dose of 1 mg, 5 mg, 10 mg, 20 mg, 40 mg, or 50 mg, L-histidine present at 20 mM, methionine present at 5 mM, NaCl present at 100 mM, and polysorbate 80 present at 0.02%, where the formulation is at a pH of about 5.8.

[0235] In some embodiments, the pharmaceutical antibody formulation comprises a therapeutically effective amount of an antibody, where the antibody comprises a V_{H}-CDR1 having the sequence of SEQ ID NO: 31, a V_{H}-CDR2 having the sequence of SEQ ID NO: 72, a V_{H}-CDR3 having the sequence of SEQ ID NO: 113, a V_{L}-CDR1 having the sequence of SEQ ID NO: 171, a V_{L}-CDR2 having the sequence of SEQ ID NO: 222; and a V_{L}-CDR3 having the sequence of SEQ ID NO: 249, where the antibody is present at an amount of 1 mg as a unit dose, L-histidine present at 20 mM, methionine present at 5 mM, NaCl present at 100 mM, polysorbate 80 present at 0.02% and where the pH is about 5.8.

[0236] In some embodiments, the pharmaceutical antibody formulation comprises a therapeutically effective amount of an antibody, where the antibody comprises a V_{H}-CDR1 having the sequence of SEQ ID NO: 31, a V_{H}-CDR2 having the sequence of SEQ ID NO: 72, a V_{H}-CDR3 having the sequence of SEQ ID NO: 113, a V_{L}-CDR1 having the sequence of SEQ ID NO: 171, a V_{L}-CDR2 having the sequence of SEQ ID NO: 222; and a V_{L}-CDR3 having the sequence of SEQ ID NO: 249, where the antibody is present at an amount of 5 mg as a unit dose, L-histidine present at 20 mM, methionine present at 5 mM, NaCl present at 100 mM, polysorbate 80 present at 0.02% and where the pH is about 5.8.

[0237] In some embodiments, the pharmaceutical antibody formulation comprises a therapeutically effective amount of an antibody, where the antibody comprises a V_{H}-CDR1 having the sequence of SEQ ID NO: 31, a V_{H}-CDR2 having the sequence of SEQ ID NO: 72, a V_{H}-CDR3 having the sequence of SEQ ID NO: 113, a V_{L}-CDR1 having the sequence of SEQ ID NO: 171, a V_{L}-CDR2 having the sequence of SEQ ID NO: 222; and a V_{L}-CDR3 having the sequence of SEQ ID NO: 249, where the antibody is present at an amount of 10 mg as a unit dose, L-histidine present at 20 mM, methionine present at 5 mM, NaCl present at 100 mM, polysorbate 80 present at 0.02% and where the pH is about 5.8.

[0238] In some embodiments, the pharmaceutical antibody formulation comprises a therapeutically effective amount of an antibody, where the antibody comprises a V_{H}-CDR1 having the sequence of SEQ ID NO: 31, a V_{H}-CDR2 having the sequence of SEQ ID NO: 72, a V_{H}-CDR3 having the sequence of SEQ ID NO: 113, a V_{L}-CDR1 having the sequence of SEQ ID NO: 171, a V_{L}-CDR2 having the sequence of SEQ ID NO: 222; and a V_{L}-CDR3 having the sequence of SEQ ID NO: 249, where the antibody is present at an amount of 20 mg as a unit dose, L-histidine present at 20 mM, methionine present at 5 mM, NaCl present at 100 mM, polysorbate 80 present at 0.02% and where the pH is about 5.8.

[0239] In some embodiments, the pharmaceutical antibody formulation comprises a therapeutically effective amount of an antibody, where the antibody comprises a V_{H}-CDR1 having the sequence of SEQ ID NO: 31, a V_{H}-CDR2 having the sequence of SEQ ID NO: 72, a V_{H}-CDR3 having the sequence of SEQ ID NO: 113, a V_{L}-CDR1 having the sequence of SEQ ID NO: 171, a V_{L}-CDR2 having the sequence of SEQ ID NO: 222; and a V_{L}-CDR3 having the sequence of SEQ ID NO: 249, where the antibody is present at an amount of 40 mg as a unit dose, L-histidine present at 20 mM, methionine present at 5 mM, NaCl present at 100 mM, polysorbate 80 present at 0.02% and where the pH is about 5.8.

[0240] In some embodiments, the pharmaceutical antibody formulation comprises a therapeutically effective amount of an antibody, where the antibody comprises a V_{H}-CDR1 having the sequence of SEQ ID NO: 31, a V_{H}-CDR2 having the sequence of SEQ ID NO: 72, a V_{H}-CDR3 having the sequence of SEQ ID NO: 113, a V_{L}-CDR1 having the sequence of SEQ ID NO: 171, a V_{L}-CDR2 having the sequence of SEQ ID NO: 222; and a V_{L}-CDR3 having the sequence of SEQ ID NO: 249, where the antibody is present at an amount of 50 mg as a unit dose, L-histidine present at 20 mM, methionine present at 5 mM, NaCl present at 100 mM, polysorbate 80 present at 0.02% and where the pH is about 5.8.

[0241] In some embodiments, the pharmaceutical antibody formulation comprises a therapeutically effective amount of an antibody, where the antibody comprises a VH region having a sequence at least 80%, 85%, 90%, 95%, 99%, or 100% identical to that of SEQ ID NO: 298 and a VL region having a sequence at least 80%, 85%, 90%, 95%, 99%, or 100% identical to that of SEQ ID NO: 375, where the antibody is present at an amount of 1 mg as a unit dose, L-histidine present at 20 mM, methionine present at 5 mM, NaCl present at 100 mM, polysorbate 80 present at 0.02% and where the pH is about 5.8.

[0242] In some embodiments, the pharmaceutical antibody formulation comprises a therapeutically effective amount of an antibody, where the antibody comprises a VH region having a sequence at least 80%, 85%, 90%, 95%, 99%, or 100% identical to that of SEQ ID NO: 298 and a VL region having a sequence at least 80%, 85%, 90%, 95%, 99%, or 100% identical to that of SEQ ID NO: 375, where the antibody is present at an amount of 5 mg as a unit dose, L-histidine present at 20 mM, methionine present at 5 mM, NaCl present at 100 mM, polysorbate 80 present at 0.02% and where the pH is about 5.8.

[0243] In some embodiments, the pharmaceutical antibody formulation comprises a therapeutically effective amount of an antibody, where the antibody comprises a VH region having a sequence at least 80%, 85%, 90%, 95%, 99%, or 100% identical to that of SEQ ID NO: 298 and a VL region having a sequence at least 80%, 85%, 90%, 95%, 99%, or 100% identical to that of SEQ ID NO: 375, where the antibody is present at an amount of 10 mg as a unit dose, L-histidine present at 20 mM, methionine present at 5 mM, NaCl present at 100 mM, polysorbate 80 present at 0.02% and where the pH is about 5.8.

[0244] In some embodiments, the pharmaceutical antibody formulation comprises a therapeutically effective amount of an antibody, where the antibody comprises a VH region having a sequence at least 80%, 85%, 90%, 95%, 99%, or 100% identical to that of SEQ ID NO: 298 and a VL region having a sequence at least 80%, 85%, 90%, 95%, 99%, or 100% identical to that of SEQ ID NO: 375, where the antibody is present at an amount of 20 mg as a unit dose, L-histidine present at 20 mM, methionine present at 5 mM, NaCl present at 100 mM, polysorbate 80 present at 0.02% and where the pH is about 5.8.

[0245] In some embodiments, the pharmaceutical antibody formulation comprises a therapeutically effective amount of an antibody, where the antibody comprises a VH region having a sequence at least 80%, 85%, 90%, 95%, 99%, or 100% identical to that of SEQ ID NO: 298 and a VL region having a sequence at least 80%, 85%, 90%, 95%, 99%, or 100% identical to that of SEQ ID NO: 375, where the antibody is present at an amount of 40 mg as a unit dose, L-histidine present at 20 mM, methionine present at 5 mM, NaCl present at 100 mM, polysorbate 80 present at 0.02% and where the pH is about 5.8.

[0246] In some embodiments, the pharmaceutical antibody formulation comprises a therapeutically effective amount of an antibody, where the antibody comprises a VH region having a sequence at least 80%, 85%, 90%, 95%, 99%, or 100% identical to that of SEQ ID NO: 298 and a VL region having a sequence at least 80%, 85%, 90%, 95%, 99%, or 100% identical to that of SEQ ID NO: 375, where the antibody is present at an amount of 50 mg as a unit dose, L-histidine present at 20 mM, methionine present at 5 mM, NaCl present at 100 mM, polysorbate 80 present at 0.02% and where the pH is about 5.8.

### Exemplary Articles of Manufacture and Kits

[0247] Disclosed herein, in certain embodiments, are kits and articles of manufacture for use with one or more of the compositions and methods described herein. Such kits include a carrier, package, or container that is compartmentalized to receive one or more containers such as vials, tubes, and the like, each of the container(s) comprising one of the separate elements to be used in a method described herein. Suitable containers include, for example, bottles, vials, syringes, and test tubes. In one embodiment, the containers are formed from a variety of materials such as glass or plastic.

[0248] The articles of manufacture provided herein contain packaging materials. Examples of pharmaceutical packaging materials include, but are not limited to, blister packs, bottles, tubes, bags, containers, bottles, and any packaging material suitable for a selected formulation and intended mode of administration and treatment.

[0249] For example, the container(s) include an anti-Gal3 antibody or binding fragment thereof as disclosed herein, host cells for producing one or more antibodies described herein, and/or vectors comprising nucleic acid molecules that encode the antibodies described herein. Such kits optionally include an identifying description or label or instructions relating to its use in the methods described herein.

[0250] A kit typically includes labels listing contents and/or instructions for use, and package inserts with instructions for use. A set of instructions will also typically be included.

[0251] In one embodiment, a label is on or associated with the container. In one embodiment, a label is on a container when letters, numbers or other characters forming the label are attached, molded or etched into the container itself; a label is associated with a container when it is present within a receptacle or carrier that also holds the container, e.g., as a package insert. In one embodiment, a label is used to indicate that the contents are to be used for a specific therapeutic application. The label also indicates directions for use of the contents, such as in the methods described herein.

[0252] In certain embodiments, the pharmaceutical compositions are presented in a pack or dispenser device which contains one or more unit dosage forms containing a compound provided herein. The pack, for example, contains metal or plastic foil, such as a blister pack. In one embodiment, the pack or dispenser device is accompanied by instructions for administration. In one embodiment, the pack or dispenser is also accompanied with a notice associated with the container in form prescribed by a governmental agency regulating the manufacture, use, or sale of pharmaceuticals, which notice is reflective of approval by the agency of the form of the drug for human or veterinary administration. Such notice, for example, is the labeling approved by the U.S. Food and Drug Administration for prescription drugs, or the approved product insert. In one embodiment, compositions containing a compound provided herein formulated in a compatible pharmaceutical carrier are also prepared, placed in an appropriate container, and labeled for treatment of an indicated condition.

[0253] In some embodiments, sterile vials comprising pharmaceutical antibody formulations are provided, where the formulations can include a therapeutically effective amount of an antibody. In some embodiments, the sterile vials comprise any one of the pharmaceutical antibody formulations disclosed herein. In some embodiments, the antibody comprises a V_{H}-CDR1 having the sequence of SEQ ID NO: 31, a V_{H}-CDR2 having the sequence of SEQ ID NO: 72, a V_{H}-CDR3 having the sequence of SEQ ID NO: 113, a V_{L}-CDR1 having the sequence of SEQ ID NO: 171, a V_{L}-CDR2 having the sequence of SEQ ID NO: 222; and a V_{L}-CDR3 having the sequence of SEQ ID NO: 249. In some embodiments, the antibody comprises a V_{H}-CDR1 that is at least 80%, 81%, 82%, 83%, 84%, 85%, 86%, 87%, 88%, 89%, 90%, 91%, 92%, 93%, 94%. 95%, 96%, 97%, 98%, 99%, or 100% identical to the sequence of SEQ ID NO: 31, a V_{H}-CDR2 that is at least 80%, 81%, 82%, 83%, 84%, 85%, 86%, 87%, 88%, 89%, 90%, 91%, 92%, 93%, 94%. 95%, 96%, 97%, 98%, 99%, or 100% identical to the sequence of SEQ ID NO: 72, a V_{H}-CDR3 that is at least 80%, 81%, 82%, 83%, 84%, 85%, 86%, 87%, 88%, 89%, 90%, 91%, 92%, 93%, 94%. 95%, 96%, 97%, 98%, 99%, or 100% identical to the sequence of SEQ ID NO: 113, a V_{L}-CDR1 that is at least 80%, 81%, 82%, 83%, 84%, 85%, 86%, 87%, 88%, 89%, 90%, 91%, 92%, 93%, 94%. 95%, 96%, 97%, 98%, 99%, or 100% identical to the sequence of SEQ ID NO: 171, a V_{L}-CDR2 that is at least 80%, 81%, 82%, 83%, 84%, 85%, 86%, 87%, 88%, 89%, 90%, 91%, 92%, 93%, 94%. 95%, 96%, 97%, 98%, 99%, or 100% identical to the sequence of SEQ ID NO: 222; and a V_{L}-CDR3 that is at least 80%, 81%, 82%, 83%, 84%, 85%, 86%, 87%, 88%, 89%, 90%, 91%, 92%, 93%, 94%. 95%, 96%, 97%, 98%, 99%, or 100% identical to the sequence of SEQ ID NO: 249. In some embodiments, the antibody comprises a V_{H}-CDR1 that is at least 80%, 81%, 82%, 83%, 84%, 85%, 86%, 87%, 88%, 89%, 90%, 91%, 92%, 93%, 94%. 95%, 96%, 97%, 98%, 99%, or 100% similar to the sequence of SEQ ID NO: 31, a V_{H}-CDR2 that is at least 80%, 81%, 82%, 83%, 84%, 85%, 86%, 87%, 88%, 89%, 90%, 91%, 92%, 93%, 94%. 95%, 96%, 97%, 98%, 99%, or 100% similar to the sequence of SEQ ID NO: 72, a V_{H}-CDR3 that is at least 80%, 81%, 82%, 83%, 84%, 85%, 86%, 87%, 88%, 89%, 90%, 91%, 92%, 93%, 94%. 95%, 96%, 97%, 98%, 99%, or 100% similar to the sequence of SEQ ID NO: 113, a V_{L}-CDR1 that is at least 80%, 81%, 82%, 83%, 84%, 85%, 86%, 87%, 88%, 89%, 90%, 91%, 92%, 93%, 94%. 95%, 96%, 97%, 98%, 99%, or 100% similar to the sequence of SEQ ID NO: 171, a V_{L}-CDR2 that is at least 80%, 81%, 82%, 83%, 84%, 85%, 86%, 87%, 88%, 89%, 90%, 91%, 92%, 93%, 94%. 95%, 96%, 97%, 98%, 99%, or 100% similar to the sequence of SEQ ID NO: 222; and a V_{L}-CDR3 that is at least 80%, 81%, 82%, 83%, 84%, 85%, 86%, 87%, 88%, 89%, 90%, 91%, 92%, 93%, 94%. 95%, 96%, 97%, 98%, 99%, or 100% similar to the sequence of SEQ ID NO: 249. In some embodiments, the pharmaceutical antibody formulations can further comprise histidine, methionine, NaCl, and polysorbate. In some embodiments, the formulation can be at a pH between 5.3 and 6.3. In some embodiments, the antibody can be an anti-Gal3 antibody. In some embodiments, the antibody can be an anti-Gal3 antibody disclosed herein, or otherwise known in the art, such as those disclosed in WO 2020/160156. In some embodiments, the antibody comprises a heavy chain variable domain (VH) region having a sequence at least 80%, 85%, 90%, 95%, 99%, or 100% identical to that of SEQ ID NO: 298. In some embodiments, the antibody comprises a heavy chain variable domain (VH) region having a sequence at least 80%, 85%, 90%, 95%, 99%, or 100% similar to that of SEQ ID NO: 298. In some embodiments, the antibody comprises a light chain variable domain (VL) region having a sequence at least 80%, 85%, 90%, 95%, 99%, or 100% identical to that of SEQ ID NO: 375. In some embodiments, the antibody comprises a light chain variable domain (VL) region having a sequence at least 80%, 85%, 90%, 95%, 99%, or 100% similar to that of SEQ ID NO: 375. In some embodiments, the formulation can also include additional ingredients and/or excipients to those listed, or exclude one or more of the positively recited options. In some embodiments, the ingredients and/or excipients can be replaced or used additionally with one or more alternatives that function to achieve the same result. In some embodiments, the histidine can be replaced with an alternative buffer with an appropriate pKa. In some embodiments, the histidine can be replaced with an alternative that has the same buffer capacity. In some embodiments, the histidine can be replaced with another amino acid. In some embodiments, the histidine can be replaced with an alternative that exhibits the same or similar antibody protective effects. In some embodiments, the histidine can be replaced with an alternative that exhibits the same or similar capacity to reduce aggregation of the antibody. In some embodiments, the histidine can be replaced with an alternative that has the same or similar cryoprotective capabilities, including alternatives that may exhibit any one or more of the properties provided herein. In some embodiments, the methionine can be replaced with an alternative buffer with an appropriate pKa. In some embodiments, the methionine can be replaced with an alternative that has the same buffer capacity. In some embodiments, the methionine can be replaced with another amino acid. In some embodiments, the methionine can be replaced with an alternative that has the same or similar antioxidant effects. In some embodiments, the methionine can be replaced with an alternative that has the same antibody protective effects. In some embodiments, the methionine can be replaced by an alternative that has the same or similar protein stabilization effects. In some embodiments, the methionine can be replaced by an alternative that exhibits the same or similar capacity to reduce aggregation of the antibody, including alternatives that may exhibit any one or more of the properties provided herein. The alternatives for histidine and/or methionine may be any of those provided herein, such as arginine or glycine, or otherwise known in the art. In some embodiments, the NaCl can be replaced with another salt. In some embodiments, the NaCl can be replaced with an alternative that has the same or similar aqueous solubility. In some embodiments, the NaCl can be replaced with an alternative that has the same or similar effect on formulation isotonicity. In some embodiments, the NaCl can be replaced with an alternative that has the same or similar protein stabilization effects, including alternatives that may exhibit one or more of the properties provided herein. The alternative for NaCl may be any of those provided herein, such as other chloride salts, other sodium salts, ascorbate salts, acetate salts, phosphate salts, citrate salts, Tris salts, or succinate salts, or otherwise known in the art. In some embodiments, the polysorbate can be replaced with another surfactant and/or detergent. In some embodiments, the polysorbate can be replaced with an alternative that has the same or similar surfactant ability/effect. In some embodiments, the polysorbate can be replaced with an alternative that has the same or similar capability for solubilizing antibodies and/or other excipients. In some embodiments, the polysorbate can be replaced with an alternative that has the same or similar capacity to reduce aggregation of the antibody. In some embodiments, the polysorbate can be replaced with an alternative that has the same or similar protein stabilization effects, including alternatives that may exhibit one or more of the properties provided herein. The alternative for polysorbate may be any of those provided herein, such as poloxamer 188, or otherwise known in the art. In some embodiments, the pH can be acidic. In some embodiments, the pH can be basic. In some embodiments, the pH can be varied. In some embodiments, the pH can be increased or decreased in line with the ingredients, excipients, and/or buffers used in the formulation and the particulars of the antibody species used and/or the amount of antibody, ingredients, or excipients used. In some embodiments, the pH can be increased or decreased to a desired pH after adding the antibody, ingredients, or excipients. The alternatives contemplated herein may be any one or more of the excipients, diluents, salts, buffers, and the like, provided throughout the disclosure. In some embodiments, the antibodies comprise one or more sequences having at least 80%, 81%, 82%, 83%, 84%, 85%, 86%, 87%, 88%, 89%, 90%, 91%, 92%, 93%, 94%, 95%, 96%, 97%, 98%, 99%, or 100% identity to a VL sequence, a VH sequence, a VL/VH pairing, and/or V_{L}-CDR1, V_{L}-CDR2, V_{L}-CDR3, V_{H}-CDR1, V_{H}-CDR2, V_{H}-CDR3 (including 1, 2, 3, 4, or 5 amino acid substitutions of any one or more of these CDRs) set from the heavy chain and light chain sequences as depicted in FIG. 18.

[0254] For any of the embodiments of the sterile vials comprising pharmaceutical antibody formulations provided herein, the histidine is L-histidine, D-histidine, or racemic histidine. For any of the embodiments of the pharmaceutical antibody formulations provided herein, the histidine is racemic histidine. For any of the embodiments of the pharmaceutical antibody formulations provided herein, the histidine is D-histidine. In some embodiments, the histidine can be replaced with an alternative buffer with an appropriate pKa. In some embodiments, the histidine can be replaced with an alternative that has the same buffer capacity. In some embodiments, the histidine can be replaced with another amino acid. In some embodiments, the histidine can be replaced with an alternative that exhibits the same or similar antibody protective effects. In some embodiments, the histidine can be replaced with an alternative that exhibits the same or similar capacity to reduce aggregation of the antibody. In some embodiments, the histidine can be replaced with an alternative that has the same or similar cryoprotective capabilities, including alternatives that may exhibit one or more of the properties provided herein. The alternatives for histidine may be any of those provided herein, such as arginine or glycine, or otherwise known in the art.

[0255] For any of the embodiments of the sterile vials comprising pharmaceutical antibody formulations provided herein, the histidine is present at 10 to 50 mM, e.g. 10, 15, 20, 25, 30, 35, 40, 45, or 50 mM. In some embodiments, the histidine is present at 20 mM or about 20 mM. In some embodiments, where the histidine is L-histidine, the L-histidine is present at 10 to 50 mM, e.g. 10, 15, 20, 25, 30, 35, 40, 45, or 50 mM. In some embodiments, where the histidine is L-histidine, the L-histidine is present at 20 mM or about 20 mM.

[0256] For any of the embodiments of the sterile vials comprising pharmaceutical antibody formulations provided herein, the methionine is L-methionine. For any of the embodiments of the pharmaceutical antibody formulations provided herein, the methionine is racemic methionine. For any of the embodiments of the pharmaceutical antibody formulations provided herein, the methionine is D-methionine. In some embodiments, the methionine can be replaced with an alternative buffer with an appropriate pKa. In some embodiments, the methionine can be replaced with an alternative that has the same buffer capacity. In some embodiments, the methionine can be replaced with another amino acid. In some embodiments, the methionine can be replaced with an alternative that has the same or similar antioxidant effects. In some embodiments, the methionine can be replaced with an alternative that has the same antibody protective effects. In some embodiments, the methionine can be replaced by an alternative that has the same or similar protein stabilization effects. In some embodiments, the methionine can be replaced by an alternative that exhibits the same or similar capacity to reduce aggregation of the antibody, including alternatives that may exhibit one or more of the properties provided herein. The alternatives for methionine may be any of those provided herein, such as arginine or glycine, or otherwise known in the art.

[0257] For any of the embodiments of the sterile vials comprising pharmaceutical antibody formulations provided herein, the methionine is present at 2 to 10 mM, e.g. 2, 3, 4, 5, 6, 7, 8, 9, or 10 mM. In some embodiments, the methionine is present at 5 mM or about 5 mM.

[0258] For any of the embodiments of the sterile vials comprising pharmaceutical antibody formulations provided herein, the NaCl is present at 50 to 150 mM, e.g. 50, 60, 70, 80, 90, 100, 110, 120, 130, 140, or 150 mM. In some embodiments, the NaCl is present at 100 mM. In some embodiments, the NaCl can be replaced with another salt. In some embodiments, the NaCl can be replaced with an alternative that has the same or similar aqueous solubility. In some embodiments, the NaCl can be replaced with an alternative that has the same or similar effect on formulation isotonicity. In some embodiments, the NaCl can be replaced with an alternative that has the same or similar protein stabilization effects, including alternatives that may exhibit one or more of the properties provided herein. The alternative for NaCl may be any of those provided herein, such as other chloride salts, other sodium salts, ascorbate salts, acetate salts, phosphate salts, citrate salts, Tris salts, or succinate salts, or otherwise known in the art.

[0259] For any of the embodiments of the sterile vials comprising pharmaceutical antibody formulations provided herein, the polysorbate comprises polysorbate 20, polysorbate 40, polysorbate 60, polysorbate 80, or any combination thereof. In some embodiments, the polysorbate comprises, consists essentially of, or consists of polysorbate 80. In some embodiments, the polysorbate is present at 0.01% to 0.04%, e.g. 0.01%, 0.02%, 0.03%, or 0.04%. In some embodiments, the polysorbate is present at about 0.01% to about 0.04%, e.g. about 0.01%, about 0.02%, about 0.03%, or about 0.04%. In some embodiments, the polysorbate is present at 0.02% or about 0.02%. In some embodiments, where the polysorbate is polysorbate 80, the polysorbate 80 is present at 0.01% to 0.04%, e.g. 0.01%, 0.02%, 0.03%, or 0.04%. In some embodiments, where the polysorbate is polysorbate 80, the polysorbate 80 is present at about 0.01% to about 0.04%, e.g. about 0.01%, about 0.02%, about 0.03%, or about 0.04%. In some embodiments, the polysorbate 80 is present at 0.02% or about 0.02%. In some embodiments, the polysorbate can be replaced with another surfactant and/or detergent. In some embodiments, the polysorbate can be replaced with an alternative that has the same or similar surfactant ability/effect. In some embodiments, the polysorbate can be replaced with an alternative that has the same or similar capability for solubilizing antibodies and/or other excipients. In some embodiments, the polysorbate can be replaced with an alternative that has the same or similar capacity to reduce aggregation of the antibody. In some embodiments, the polysorbate can be replaced with an alternative that has the same or similar protein stabilization effects, including alternatives that may exhibit one or more of the properties provided herein. The alternative for polysorbate may be any of those provided herein, such as poloxamer 188, or otherwise known in the art.

[0260] For any of the embodiments of the sterile vials comprising pharmaceutical antibody formulations provided herein, the pH is about 5.8. In some embodiments, the pH is 5.8. In some embodiments, the pH can be acidic. In some embodiments, the pH can be basic. In some embodiments, the pH can be varied. In some embodiments, the pH can be increased or decreased in line with the ingredients, excipients, and/or buffers used in the formulation and the particulars of the antibody species used and/or the amount of antibody, ingredients, or excipients used. In some embodiments, the pH can be increased or decreased to a desired pH after adding the antibody, ingredients, or excipients.

[0261] For any of the embodiments of the sterile vials comprising pharmaceutical antibody formulations provided herein, the formulations further comprise one or more sugars or one or more sugar alcohols, or both, including any one of the sugars or sugar alcohols disclosed herein or otherwise known in the art. In some embodiments, the one or more sugars comprises sucrose. In some embodiments, the one or more sugar alcohols comprise mannitol. In some embodiments, the formulations comprise sucrose or mannitol, or both. In some embodiments, the formulations comprise sucrose and mannitol. In some embodiments, the sucrose and/or mannitol can be replaced with another sugar and/or sugar alcohol. In some embodiments, the sucrose and/or mannitol can be replaced with an alternative that has the same or similar antibody protective effects. In some embodiments, the sucrose and/or mannitol can be replaced with an alternative that exhibits the same or similar capacity to reduce aggregation of the antibody. In some embodiments, the sucrose and/or mannitol can be replaced with an alternative that has the same or similar cryoprotective capabilities. In some embodiments, the sucrose and/or mannitol can be replaced with an alternative that have the same effect on isotonicity, including alternatives that may exhibit one or more of the properties provided herein. The alternative for sucrose and/or mannitol may be any of those provided herein, such as sorbitol, trehalose, dextrose, dextran, or dextran 40, or otherwise known in the art.

[0262] In some embodiments, the one or more sugars or one or more sugar alcohols are present at 2% to 5%, e.g. 2%, 3%, 4%, or 5%. In some embodiments, the one or more sugars or one or more sugar alcohols are present at about 2% to about 5%, e.g. about 2%, about 3%, about 4%, or about 5%. In some embodiments where the sugar is sucrose, the sucrose is present at 2% to 5% or about 2% to 5%. In some embodiments where the sugar alcohol is mannitol, the mannitol is present at 2% to 5% or about 2% to 5%.

[0263] For any of the embodiments of the sterile vials comprising pharmaceutical antibody formulations provided herein, the formulation is configured for parenteral administration. In some embodiments, the formulation is configured for subcutaneous administration. In some embodiments, the formulation configured for subcutaneous administration comprises one or more sugars and/or one or more sugar alcohols. In some embodiments, the formulation configured for subcutaneous administration comprises sucrose or mannitol, or both. In some embodiments, the formulation is configured for intravenous administration. In some embodiments, the formulation configured for intravenous administration does not comprise one or more sugars and/or one or more sugar alcohols. In some embodiments, the formulation configured for intravenous administration does not comprise sucrose or mannitol, or both.

[0264] In some embodiments are sterile vials comprising a pharmaceutical antibody formulation comprising a therapeutically effective amount of an antibody, such as an anti-Gal3 antibody. In some embodiments, the sterile vials comprise any of the pharmaceutical antibody formulations disclosed herein. In some embodiments, the pharmaceutical antibody formulation comprises a therapeutically effective amount of an antibody. In some embodiments, the antibody is an anti-Gal3 antibody. In some embodiments, the antibody is any one of the anti-Gal3 antibodies disclosed herein or otherwise known in the art, such as those described in WO 2020/160156. In some embodiments, the antibody comprises a V_{H}-CDR1 having the sequence of SEQ ID NO: 31, a V_{H}-CDR2 having the sequence of SEQ ID NO: 72, a V_{H}-CDR3 having the sequence of SEQ ID NO: 113, a V_{L}-CDR1 having the sequence of SEQ ID NO: 171, a V_{L}-CDR2 having the sequence of SEQ ID NO: 222; and a V_{L}-CDR3 having the sequence of SEQ ID NO: 249. In some embodiments, the antibody comprises a V_{H}-CDR1 that is at least 80%, 81%, 82%, 83%, 84%, 85%, 86%, 87%, 88%, 89%, 90%, 91%, 92%, 93%, 94%. 95%, 96%, 97%, 98%, 99%, or 100% identical to the sequence of SEQ ID NO: 31, a V_{H}-CDR2 that is at least 80%, 81%, 82%, 83%, 84%, 85%, 86%, 87%, 88%, 89%, 90%, 91%, 92%, 93%, 94%. 95%, 96%, 97%, 98%, 99%, or 100% identical to the sequence of SEQ ID NO: 72, a V_{H}-CDR3 that is at least 80%, 81%, 82%, 83%, 84%, 85%, 86%, 87%, 88%, 89%, 90%, 91%, 92%, 93%, 94%. 95%, 96%, 97%, 98%, 99%, or 100% identical to the sequence of SEQ ID NO: 113, a V_{L}-CDR1 that is at least 80%, 81%, 82%, 83%, 84%, 85%, 86%, 87%, 88%, 89%, 90%, 91%, 92%, 93%, 94%. 95%, 96%, 97%, 98%, 99%, or 100% identical to the sequence of SEQ ID NO: 171, a V_{L}-CDR2 that is at least 80%, 81%, 82%, 83%, 84%, 85%, 86%, 87%, 88%, 89%, 90%, 91%, 92%, 93%, 94%. 95%, 96%, 97%, 98%, 99%, or 100% identical to the sequence of SEQ ID NO: 222; and a V_{L}-CDR3 that is at least 80%, 81%, 82%, 83%, 84%, 85%, 86%, 87%, 88%, 89%, 90%, 91%, 92%, 93%, 94%. 95%, 96%, 97%, 98%, 99%, or 100% identical to the sequence of SEQ ID NO: 249. In some embodiments, the antibody comprises a V_{H}-CDR1 that is at least 80%, 81%, 82%, 83%, 84%, 85%, 86%, 87%, 88%, 89%, 90%, 91%, 92%, 93%, 94%. 95%, 96%, 97%, 98%, 99%, or 100% similar to the sequence of SEQ ID NO: 31, a V_{H}-CDR2 that is at least 80%, 81%, 82%, 83%, 84%, 85%, 86%, 87%, 88%, 89%, 90%, 91%, 92%, 93%, 94%. 95%, 96%, 97%, 98%, 99%, or 100% similar to the sequence of SEQ ID NO: 72, a V_{H}-CDR3 that is at least 80%, 81%, 82%, 83%, 84%, 85%, 86%, 87%, 88%, 89%, 90%, 91%, 92%, 93%, 94%. 95%, 96%, 97%, 98%, 99%, or 100% similar to the sequence of SEQ ID NO: 113, a V_{L}-CDR1 that is at least 80%, 81%, 82%, 83%, 84%, 85%, 86%, 87%, 88%, 89%, 90%, 91%, 92%, 93%, 94%. 95%, 96%, 97%, 98%, 99%, or 100% similar to the sequence of SEQ ID NO: 171, a V_{L}-CDR2 that is at least 80%, 81%, 82%, 83%, 84%, 85%, 86%, 87%, 88%, 89%, 90%, 91%, 92%, 93%, 94%. 95%, 96%, 97%, 98%, 99%, or 100% similar to the sequence of SEQ ID NO: 222; and a V_{L}-CDR3 that is at least 80%, 81%, 82%, 83%, 84%, 85%, 86%, 87%, 88%, 89%, 90%, 91%, 92%, 93%, 94%. 95%, 96%, 97%, 98%, 99%, or 100% similar to the sequence of SEQ ID NO: 249. In some embodiments, the antibody comprises a V_{H}-CDR1 having a sequence that has at least 0, 1, 2, 3, 4, 5, or 6 substitutions relative to the sequence of SEQ ID NO: 31, a V_{H}-CDR2 having a sequence that has at least 0, 1, 2, 3, 4, 5, or 6 substitutions relative to the sequence of SEQ ID NO: 72, a V_{H}-CDR3 having a sequence that has at least 0, 1, 2, 3, 4, 5, or 6 substitutions relative to the sequence of SEQ ID NO: 113, a V_{L}-CDR1 having a sequence that has at least 0, 1, 2, 3, 4, 5, or 6 substitutions relative to the sequence of SEQ ID NO: 171, a V_{L}-CDR2 having a sequence that has at least 0, 1, 2, 3, 4, 5, or 6 substitutions relative to the sequence of SEQ ID NO: 222; and a V_{L}-CDR3 having a sequence that has at least 0, 1, 2, 3, 4, 5, or 6 substitutions relative to the sequence of SEQ ID NO: 249. In some embodiments, the pharmaceutical antibody formulation in the sterile vial further comprises histidine, methionine, NaCl, and polysorbate. In some embodiments, the pharmaceutical antibody formulation in the sterile vial is at a pH between 5.3 and 6.3. In some embodiments, the sterile vial is a 1, 2, 3, 4, 5, 6, 7, 8, 9, or 10 mL sterile vial. In some embodiments, the sterile vial is a 5 mL sterile vial. In some embodiments, the sterile vial is a 10 mL sterile vial. In some embodiments, the sterile vial contains 1, 2, 3, 4, 5, 6, 7, 8, 9, or 10 mL of the pharmaceutical antibody formulation. In some embodiments, the sterile vial contains 2 mL or at least 2 mL of the pharmaceutical antibody formulation. In some embodiments, the sterile vial contains 8 mL or at least 8 mL of the pharmaceutical antibody formulation. In some embodiments, the pharmaceutical antibody formulation in the sterile vial is a concentrated form of any one of the pharmaceutical antibody formulations disclosed herein. In some embodiments, the concentrated form of the pharmaceutical antibody formulation in the sterile vial is at a concentration of 10, 11, 12, 13, 14, 15, 16, 17, 18, 19, 20, 21, 22, 23, 24, 25, 26, 27, 28, 29, 30, 31, 32, 33, 34, 35, 36, 37, 38, 39, 40, 41, 42, 43, 44, 45, 46, 47, 48, 49, 50, 51, 52, 53, 54, 55, 56, 57, 58, 59, 60, 61, 62, 63, 64, 65, 66, 67, 68, 69, 70, 71, 72, 73, 74, 75, 76, 77, 78, 79, 80, 81, 82, 83, 84, 85, 86, 87, 88, 89, 90, 91, 92, 93, 94, 95, 96, 97, 98, 99, or 100 mg/mL. In some embodiments, the concentrated form of the pharmaceutical antibody formation in the sterile vial is at a concentration of 20 mg/mL or about 20 mg/mL or at least 20 mg/mL. In some embodiments, the concentrated form of the pharmaceutical antibody formulation in the sterile vial is at a concentration of 50 mg/mL or about 50 mg/mL or at least 50 mg/mL. In some embodiments, the sterile vial contains 1, 2, 3, 4, 5, 6, 7, 8, 9, or 10 mL of the concentrated form of the pharmaceutical antibody formulation, where the concentrated form of the pharmaceutical antibody formulation is at a concentration of 10, 11, 12, 13, 14, 15, 16, 17, 18, 19, 20, 21, 22, 23, 24, 25, 26, 27, 28, 29, 30, 31, 32, 33, 34, 35, 36, 37, 38, 39, 40, 41, 42, 43, 44, 45, 46, 47, 48, 49, 50, 51, 52, 53, 54, 55, 56, 57, 58, 59, 60, 61, 62, 63, 64, 65, 66, 67, 68, 69, 70, 71, 72, 73, 74, 75, 76, 77, 78, 79, 80, 81, 82, 83, 84, 85, 86, 87, 88, 89, 90, 91, 92, 93, 94, 95, 96, 97, 98, 99, or 100 mg/mL of antibody. In some embodiments, the sterile vial comprises 10, 20, 30, 40, 50, 60, 70, 80, 90, 100, 110, 120, 130, 140, 150, 160, 170, 180, 190, 200, 210, 220, 230, 240, 250, 260, 270, 280, 290, 300, 310, 320, 330, 340, 350, 360, 370, 380, 390, 400, 410, 420, 430, 440, 450, 460, 470, 480, 490, 500, 510, 520, 530, 540, 550, 560, 570, 580, 590, 600, 610, 620, 630, 640, 650, 660, 670, 680, 690, 700, 710, 720, 730, 740, 750, 760, 770, 780, 790, 800, 810, 820, 830, 840, 850, 860, 870, 880, 890, 900, 910, 920, 930, 940, 950, 960, 970, 980, 990, or 1000 mg of the antibody, or any amount of antibody within a range defined by any two of the aforementioned amounts. In some embodiments, the concentrated form of the pharmaceutical antibody formulation in the sterile vial is intended to be diluted 1×, 2×, 3×, 4×, 5×, 6×, 7×, 8×, 9×, 10×, 11×, 12×, 13×, 14×, 15×, 16×, 17×, 18×, 19×, 20×, 30×, 40×, 50×, 60×, 70×, 80×, 90×, or 100× fold, or any fold within a range defined by any two of the aforementioned fold. In some embodiments, the concentrated form of the pharmaceutical antibody formulation in the sterile vial is intended to be diluted to 0.1, 0.2, 0.3, 0.4, 0.5, 0.6, 0.7, 0.8, 0.9, 1, 2, 3, 4, 5, 6, 7, 8, 9, 10, 11, 12, 13, 14, 15, 16, 17, 18, 19, or 20 mg/mL or any concentration within a range defined by any two of the aforementioned concentrations. In some embodiments, the concentrated form of the pharmaceutical antibody formulation is intended to be diluted into a final volume of 200, 210, 220, 230, 240, 250, 260, 270, 280, 290, 300, 310, 320, 330, 340, 350, 360, 370, 380, 390, 400, 410, 420, 430, 440, 450, 460, 470, 480, 490, 500, 510, 520, 530, 540, 550, 560, 570, 580, 590, or 600 mL. In some embodiments, the concentrated form of the pharmaceutical antibody formulation is intended to be diluted into a final volume of 250 mL or 500 mL. In some embodiments, the concentrated form of the pharmaceutical antibody formulation in the sterile vial is intended to be diluted with saline. In some embodiments, the saline is 0.9% saline. In some embodiments, the pharmaceutical antibody formulation in the sterile vial is configured for parenteral administration. In some embodiments, the pharmaceutical antibody formulation in the sterile vial is configured for subcutaneous administration. In some embodiments, the pharmaceutical antibody formulation in the sterile vial configured for subcutaneous administration comprises sucrose or mannitol, or both. In some embodiments, the pharmaceutical antibody formulation in the sterile vial is configured for intravenous administration. In some embodiments, the pharmaceutical antibody formulation in the sterile vial configured for intravenous administration does not comprise sucrose or mannitol, or both. In some embodiments, the pharmaceutical antibody formulation remains 60%, 65%, 70%, 75%, 80%, 85%, 90%, 95%, 99%, or 100% stable over 3 months. In some embodiments, the pharmaceutical antibody formulation remains 60%, 65%, 70%, 75%, 80%, 85%, 90%, 95%, 99%, or 100% stable over 3 months at either 5° C. or 25° C./60% relative humidity (RH).

[0265] In some embodiments, the sterile vial comprises a pharmaceutical antibody formulation comprising a therapeutically effective amount of an antibody or a concentrated form of the pharmaceutical antibody formulation, where the antibody comprises a V_{H}-CDR1 having the sequence of SEQ ID NO: 31, a V_{H}-CDR2 having the sequence of SEQ ID NO: 72, a V_{H}-CDR3 having the sequence of SEQ ID NO: 113, a V_{L}-CDR1 having the sequence of SEQ ID NO: 171, a V_{L}-CDR2 having the sequence of SEQ ID NO: 222; and a V_{L}-CDR3 having the sequence of SEQ ID NO: 249 (or at least 80%, 81%, 82%, 83%, 84%, 85%, 86%, 87%, 88%, 89%, 90%, 91%, 92%, 93%, 94%, 95%, 96%, 97%, 98%, 99%, or 100% identical or similar to the respective sequence), where the antibody is present at an amount of 1 mg as a unit dose, L-histidine present at 20 mM, methionine present at 5 mM, NaCl present at 100 mM, polysorbate 80 present at 0.02% and where the pH is about 5.8. In some embodiments, the pharmaceutical antibody formulation is a concentrated form. In some embodiments, the pharmaceutical antibody formulation is at a concentration of 20 mg/mL or about 20 mg/mL of antibody. In some embodiments, the pharmaceutical antibody formulation is at a concentration of 50 mg/mL or about 50 mg/mL of antibody.

[0266] In some embodiments, the sterile vial comprises a pharmaceutical antibody formulation comprising a therapeutically effective amount of an antibody or a concentrated form of the pharmaceutical antibody formulation, where the antibody comprises a V_{H}-CDR1 having the sequence of SEQ ID NO: 31, a V_{H}-CDR2 having the sequence of SEQ ID NO: 72, a V_{H}-CDR3 having the sequence of SEQ ID NO: 113, a V_{L}-CDR1 having the sequence of SEQ ID NO: 171, a V_{L}-CDR2 having the sequence of SEQ ID NO: 222; and a V_{L}-CDR3 having the sequence of SEQ ID NO: 249 (or at least 80%, 81%, 82%, 83%, 84%, 85%, 86%, 87%, 88%, 89%, 90%, 91%, 92%, 93%, 94%, 95%, 96%, 97%, 98%, 99%, or 100% identical or similar to the respective sequence), where the antibody is present at an amount of 5 mg as a unit dose, L-histidine present at 20 mM, methionine present at 5 mM, NaCl present at 100 mM, polysorbate 80 present at 0.02% and where the pH is about 5.8. In some embodiments, the pharmaceutical antibody formulation is a concentrated form. In some embodiments, the pharmaceutical antibody formulation is at a concentration of 20 mg/mL or about 20 mg/mL of antibody. In some embodiments, the pharmaceutical antibody formulation is at a concentration of 50 mg/mL or about 50 mg/mL of antibody.

[0267] In some embodiments, the sterile vial comprises a pharmaceutical antibody formulation comprising a therapeutically effective amount of an antibody or a concentrated form of the pharmaceutical antibody formulation, where the antibody comprises a V_{H}-CDR1 having the sequence of SEQ ID NO: 31, a V_{H}-CDR2 having the sequence of SEQ ID NO: 72, a V_{H}-CDR3 having the sequence of SEQ ID NO: 113, a V_{L}-CDR1 having the sequence of SEQ ID NO: 171, a V_{L}-CDR2 having the sequence of SEQ ID NO: 222; and a V_{L}-CDR3 having the sequence of SEQ ID NO: 249 (or at least 80%, 81%, 82%, 83%, 84%, 85%, 86%, 87%, 88%, 89%, 90%, 91%, 92%, 93%, 94%, 95%, 96%, 97%, 98%, 99%, or 100% identical or similar to the respective sequence), where the antibody is present at an amount of 10 mg as a unit dose, L-histidine present at 20 mM, methionine present at 5 mM, NaCl present at 100 mM, polysorbate 80 present at 0.02% and where the pH is about 5.8. In some embodiments, the pharmaceutical antibody formulation is a concentrated form. In some embodiments, the pharmaceutical antibody formulation is at a concentration of 20 mg/mL or about 20 mg/mL of antibody. In some embodiments, the pharmaceutical antibody formulation is at a concentration of 50 mg/mL or about 50 mg/mL of antibody.

[0268] In some embodiments, the sterile vial comprises a pharmaceutical antibody formulation comprising a therapeutically effective amount of an antibody or a concentrated form of the pharmaceutical antibody formulation, where the antibody comprises a V_{H}-CDR1 having the sequence of SEQ ID NO: 31, a V_{H}-CDR2 having the sequence of SEQ ID NO: 72, a V_{H}-CDR3 having the sequence of SEQ ID NO: 113, a V_{L}-CDR1 having the sequence of SEQ ID NO: 171, a V_{L}-CDR2 having the sequence of SEQ ID NO: 222; and a V_{L}-CDR3 having the sequence of SEQ ID NO: 249 (or at least 80%, 81%, 82%, 83%, 84%, 85%, 86%, 87%, 88%, 89%, 90%, 91%, 92%, 93%, 94%, 95%, 96%, 97%, 98%, 99%, or 100% identical or similar to the respective sequence), where the antibody is present at an amount of 20 mg as a unit dose, L-histidine present at 20 mM, methionine present at 5 mM, NaCl present at 100 mM, polysorbate 80 present at 0.02% and where the pH is about 5.8. In some embodiments, the pharmaceutical antibody formulation is a concentrated form. In some embodiments, the pharmaceutical antibody formulation is at a concentration of 20 mg/mL or about 20 mg/mL of antibody. In some embodiments, the pharmaceutical antibody formulation is at a concentration of 50 mg/mL or about 50 mg/mL of antibody.

[0269] In some embodiments, the sterile vial comprises a pharmaceutical antibody formulation comprising a therapeutically effective amount of an antibody or a concentrated form of the pharmaceutical antibody formulation, where the antibody comprises a V_{H}-CDR1 having the sequence of SEQ ID NO: 31, a V_{H}-CDR2 having the sequence of SEQ ID NO: 72, a V_{H}-CDR3 having the sequence of SEQ ID NO: 113, a V_{L}-CDR1 having the sequence of SEQ ID NO: 171, a V_{L}-CDR2 having the sequence of SEQ ID NO: 222; and a V_{L}-CDR3 having the sequence of SEQ ID NO: 249 (or at least 80%, 81%, 82%, 83%, 84%, 85%, 86%, 87%, 88%, 89%, 90%, 91%, 92%, 93%, 94%, 95%, 96%, 97%, 98%, 99%, or 100% identical or similar to the respective sequence), where the antibody is present at an amount of 40 mg as a unit dose, L-histidine present at 20 mM, methionine present at 5 mM, NaCl present at 100 mM, polysorbate 80 present at 0.02% and where the pH is about 5.8. In some embodiments, the pharmaceutical antibody formulation is a concentrated form. In some embodiments, the pharmaceutical antibody formulation is at a concentration of 20 mg/mL or about 20 mg/mL of antibody. In some embodiments, the pharmaceutical antibody formulation is at a concentration of 50 mg/mL or about 50 mg/mL of antibody.

[0270] In some embodiments, the sterile vial comprises a pharmaceutical antibody formulation comprising a therapeutically effective amount of an antibody or a concentrated form of the pharmaceutical antibody formulation, where the antibody comprises a V_{H}-CDR1 having the sequence of SEQ ID NO: 31, a V_{H}-CDR2 having the sequence of SEQ ID NO: 72, a V_{H}-CDR3 having the sequence of SEQ ID NO: 113, a V_{L}-CDR1 having the sequence of SEQ ID NO: 171, a V_{L}-CDR2 having the sequence of SEQ ID NO: 222; and a V_{L}-CDR3 having the sequence of SEQ ID NO: 249 (or at least 80%, 81%, 82%, 83%, 84%, 85%, 86%, 87%, 88%, 89%, 90%, 91%, 92%, 93%, 94%, 95%, 96%, 97%, 98%, 99%, or 100% identical or similar to the respective sequence), where the antibody is present at an amount of 50 mg as a unit dose, L-histidine present at 20 mM, methionine present at 5 mM, NaCl present at 100 mM, polysorbate 80 present at 0.02% and where the pH is about 5.8. In some embodiments, the pharmaceutical antibody formulation is a concentrated form. In some embodiments, the pharmaceutical antibody formulation is at a concentration of 20 mg/mL about 20 mg/mL of antibody. In some embodiments, the pharmaceutical antibody formulation is at a concentration of 50 mg/mL or about 50 mg/mL of antibody.

[0271] In some embodiments, the sterile vial comprises a pharmaceutical antibody formulation comprising a therapeutically effective amount of an antibody or a concentrated form of the pharmaceutical antibody formulation, where the antibody comprises a VH region having a sequence at least 80%, 85%, 90%, 95%, 99%, or 100% identical to that of SEQ ID NO: 298 and a VL region having a sequence at least 80%, 85%, 90%, 95%, 99%, or 100% identical or similar to that of SEQ ID NO: 375, where the antibody is present at an amount of 1 mg as a unit dose, L-histidine present at 20 mM, methionine present at 5 mM, NaCl present at 100 mM, polysorbate 80 present at 0.02% and where the pH is about 5.8. In some embodiments, the pharmaceutical antibody formulation is a concentrated form. In some embodiments, the pharmaceutical antibody formulation is at a concentration of 20 mg/mL or about 20 mg/mL of antibody. In some embodiments, the pharmaceutical antibody formulation is at a concentration of 50 mg/mL or about 50 mg/mL of antibody.

[0272] In some embodiments, the sterile vial comprises a pharmaceutical antibody formulation comprising a therapeutically effective amount of an antibody or a concentrated form of the pharmaceutical antibody formulation, where the antibody comprises a VH region having a sequence at least 80%, 85%, 90%, 95%, 99%, or 100% identical to that of SEQ ID NO: 298 and a VL region having a sequence at least 80%, 85%, 90%, 95%, 99%, or 100% identical or similar to that of SEQ ID NO: 375, where the antibody is present at an amount of 5 mg as a unit dose, L-histidine present at 20 mM, methionine present at 5 mM, NaCl present at 100 mM, polysorbate 80 present at 0.02% and where the pH is about 5.8. In some embodiments, the pharmaceutical antibody formulation is a concentrated form. In some embodiments, the pharmaceutical antibody formulation is at a concentration of 20 mg/mL or about 20 mg/mL of antibody. In some embodiments, the pharmaceutical antibody formulation is at a concentration of 50 mg/mL or about 50 mg/mL of antibody.

[0273] In some embodiments, the sterile vial comprises a pharmaceutical antibody formulation comprising a therapeutically effective amount of an antibody or a concentrated form of the pharmaceutical antibody formulation, where the antibody comprises a VH region having a sequence at least 80%, 85%, 90%, 95%, 99%, or 100% identical or similar to that of SEQ ID NO: 298 and a VL region having a sequence at least 80%, 85%, 90%, 95%, 99%, or 100% identical or similar to that of SEQ ID NO: 375, where the antibody is present at an amount of 10 mg as a unit dose, L-histidine present at 20 mM, methionine present at 5 mM, NaCl present at 100 mM, polysorbate 80 present at 0.02% and where the pH is about 5.8. In some embodiments, the pharmaceutical antibody formulation is a concentrated form. In some embodiments, the pharmaceutical antibody formulation is at a concentration of 20 mg/mL or about 20 mg/mL of antibody. In some embodiments, the pharmaceutical antibody formulation is at a concentration of 50 mg/mL or about 50 mg/mL of antibody.

[0274] In some embodiments, the sterile vial comprises a pharmaceutical antibody formulation comprising a therapeutically effective amount of an antibody or a concentrated form of the pharmaceutical antibody formulation, where the antibody comprises a VH region having a sequence at least 80%, 85%, 90%, 95%, 99%, or 100% identical or similar to that of SEQ ID NO: 298 and a VL region having a sequence at least 80%, 85%, 90%, 95%, 99%, or 100% identical or similar to that of SEQ ID NO: 375, where the antibody is present at an amount of 20 mg as a unit dose, L-histidine present at 20 mM, methionine present at 5 mM, NaCl present at 100 mM, polysorbate 80 present at 0.02% and where the pH is about 5.8. In some embodiments, the pharmaceutical antibody formulation is a concentrated form. In some embodiments, the pharmaceutical antibody formulation is at a concentration of 20 mg/mL or about 20 mg/mL of antibody. In some embodiments, the pharmaceutical antibody formulation is at a concentration of 50 mg/mL or about 50 mg/mL of antibody.

[0275] In some embodiments, the sterile vial comprises a pharmaceutical antibody formulation comprising a therapeutically effective amount of an antibody or a concentrated form of the pharmaceutical antibody formulation, where the antibody comprises a VH region having a sequence at least 80%, 85%, 90%, 95%, 99%, or 100% identical or similar to that of SEQ ID NO: 298 and a VL region having a sequence at least 80%, 85%, 90%, 95%, 99%, or 100% identical or similar to that of SEQ ID NO: 375, where the antibody is present at an amount of 40 mg as a unit dose, L-histidine present at 20 mM, methionine present at 5 mM, NaCl present at 100 mM, polysorbate 80 present at 0.02% and where the pH is about 5.8. In some embodiments, the pharmaceutical antibody formulation is a concentrated form. In some embodiments, the pharmaceutical antibody formulation is at a concentration of 20 mg/mL or about 20 mg/mL of antibody. In some embodiments, the pharmaceutical antibody formulation is at a concentration of 50 mg/mL or about 50 mg/mL of antibody.

[0276] In some embodiments, the sterile vial comprises a pharmaceutical antibody formulation comprising a therapeutically effective amount of an antibody or a concentrated form of the pharmaceutical antibody formulation, where the antibody comprises a VH region having a sequence at least 80%, 85%, 90%, 95%, 99%, or 100% identical or similar to that of SEQ ID NO: 298 and a VL region having a sequence at least 80%, 85%, 90%, 95%, 99%, or 100% identical or similar to that of SEQ ID NO: 375, where the antibody is present at an amount of 50 mg as a unit dose, L-histidine present at 20 mM, methionine present at 5 mM, NaCl present at 100 mM, polysorbate 80 present at 0.02% and where the pH is about 5.8. In some embodiments, the pharmaceutical antibody formulation is a concentrated form. In some embodiments, the pharmaceutical antibody formulation is at a concentration of 20 mg/mL or about 20 mg/mL of antibody. In some embodiments, the pharmaceutical antibody formulation is at a concentration of 50 mg/mL or about 50 mg/mL of antibody.

[0277] In some embodiments, the sterile vial can be substituted with a suitable alternative container, such as a tube, bag, pack, syringe, or dispenser. In some embodiments, the vial or alternative container may be contained within a kit for use. In some embodiments, the kit may contain identifying description, label, or instructions relating to its use in the methods disclosed herein. In some embodiments, the kit also includes a notice prescribed by a government agency regulating the manufacture, use, or sale of pharmaceuticals, denoting approval of the form of the drug for human or veterinary administration.

### Exemplary Methods of Use and Therapeutic Regimens

[0278] In some embodiments, the anti-Gal3 antibodies or binding fragments thereof disclosed herein are administered for therapeutic applications. In some embodiments, the anti-Gal3 antibody or binding fragment thereof is administered once per day, twice per day, three times per day or more. In some embodiments, the anti-Gal3 antibody or binding fragment thereof is administered daily, every day, every alternate day, five days a week, once a week, every other week, two weeks per month, three weeks per month, once a month, twice a month, three times per month, or more. In some embodiments, the anti-Gal3 antibody or binding fragment thereof is administered for at least 1 month, 2 months, 3 months, 4 months, 5 months, 6 months, 7 months, 8 months, 9 months, 10 months, 11 months, 12 months, 18 months, 2 years, 3 years, or more.

[0279] In the case wherein the patient's status does improve, upon the doctor's discretion the administration of the anti-Gal3 antibody or binding fragment thereof is given continuously; alternatively, the dose of the anti-Gal3 antibody or binding fragment thereof being administered is temporarily reduced or temporarily suspended for a certain length of time (i.e., a “drug holiday”). In some embodiments, the length of the drug holiday varies between 2 days and 1 year, including by way of example only, 2 days, 3 days, 4 days, 5 days, 6 days, 7 days, 10 days, 12 days, 15 days, 20 days, 28 days, 35 days, 50 days, 70 days, 100 days, 120 days, 150 days, 180 days, 200 days, 250 days, 280 days, 300 days, 320 days, 350 days, or 365 days. The dose reduction during a drug holiday is from 10%-100%, including, by way of example only, 10%, 15%, 20%, 25%, 30%, 35%, 40%, 45%, 50%, 55%, 60%, 65%, 70%, 75%, 80%, 85%, 90%, 95%, or 100%.

[0280] Once improvement of the patient's condition has occurred, a maintenance dose is administered if necessary. Subsequently, the dosage or the frequency of administration, or both, can be reduced, as a function of the symptoms, to a level at which the improved disease, disorder, or condition is retained.

[0281] In some embodiments, the amount of a given agent that correspond to such an amount varies depending upon factors such as the particular compound, the severity of the disease, the identity (e.g., weight) of the subject or host in need of treatment, but nevertheless is routinely determined in a manner known in the art according to the particular circumstances surrounding the case, including, e.g., the specific agent being administered, the route of administration, and the subject or host being treated. In some embodiments, the desired dose is conveniently presented in a single dose or as divided doses administered simultaneously (or over a short period of time) or at appropriate intervals, for example as two, three, four or more sub-doses per day.

[0282] The foregoing ranges are merely suggestive, as the number of variables in regard to an individual treatment regime is large, and considerable excursions from these recommended values are not uncommon. Such dosages is altered depending on a number of variables, not limited to the activity of the compound used, the disease or condition to be treated, the mode of administration, the requirements of the individual subject, the severity of the disease or condition being treated, and the judgment of the practitioner.

[0283] In some embodiments, toxicity and therapeutic efficacy of such therapeutic regimens are determined by standard pharmaceutical procedures in cell cultures or experimental animals, including, but not limited to, the determination of the LD50 (the dose lethal to 50% of the population) and the ED50 (the dose therapeutically effective in 50% of the population). The dose ratio between the toxic and therapeutic effects is the therapeutic index and it is expressed as the ratio between LD50 and ED50. Compounds exhibiting high therapeutic indices are preferred. The data obtained from cell culture assays and animal studies are used in formulating a range of dosage for use in human. The dosage of such compounds lies preferably within a range of circulating concentrations that include the ED50 with minimal toxicity. The dosage varies within this range depending upon the dosage form employed and the route of administration utilized.

[0284] In some embodiments, the methods and uses disclosed herein are directed to the treatment of a disease or disorder in a subject. In some embodiments, the methods and uses are directed to administering a protein to a subject having, suspected of having, or at risk of developing a disease or disorder. In some embodiments, the protein is an anti-Gal3 antibody or binding fragment thereof. In some embodiments, the disease or disorder is a viral infection. In some embodiments, the disease or disorder is a coronavirus infection. In some embodiments, the disease or disorder is a SARS-CoV-2 viral infection. In some embodiments, the methods and uses are directed to treating a sequela that arises from a disease or disorder. In some embodiments, the sequela is lung fibrosis or other fibrosis or sequela caused by a SARS-CoV-2 viral infection. In some embodiments, the disease or disorder is an inflammatory disease, which may or may not be associated with a viral infection. In some embodiments, the inflammatory disease may be a lung inflammatory disease (e.g. COPD), or an autoimmune disease (e.g. systemic lupus erythematosus). In some embodiments, the inflammatory disease is associated with neutrophil activation and/or migration in the subject.

[0285] In some embodiments, a method of treating lung fibrosis in a subject in need thereof is provided. The method comprises administering to the subject a protein. In some embodiments, the protein is an anti-Gal3 antibody or binding fragment thereof. In some embodiments, the anti-Gal3 antibody or binding fragment is specific for the N-terminal domain of Gal3, N-terminus of Gal3, or the TRD of Gal3. The anti-Gal3 antibody or binding fragment thereof disrupts an interaction between Gal3 and a TGF-b receptor. In some embodiments, the lung fibrosis is a sequela of a viral infection. In some embodiments, the subject can have any viral infection. In some embodiments, the viral infection is a respiratory viral infection. In some embodiments, any of the methods provided herein can be used in a subject that has a viral infection. In some embodiments, the viral infection is a coronavirus infection. In some embodiments, the viral infection is a SARS-related coronavirus infection. In some embodiments, the viral infection is a SARS-CoV-2 coronavirus infection. In some embodiments, the anti-Gal3 antibody or binding fragment thereof comprises or includes any one or more of the sequences described herein or provided in any one or more of FIG. 8, 9, 10, 11, 12, 13, 14, 15, 16, 17, or 18 or any one or more of a sequence that is at least 80%, 81%, 82%, 83%, 84%, 85%, 86%, 87%, 88%, 89%, 90%, 91%, 92%, 93%, 94%, 95%, 96%, 97%, 98%, 99% or greater identical thereto.

[0286] In some embodiments, a method of disrupting an interaction between Gal3 and a virus-associated host cell receptor is provided. The method comprises contacting the virus-associated host cell receptor with a protein. In some embodiments, the protein is an anti-Gal3 antibody or binding fragment thereof. In some embodiments, the anti-Gal3 antibody or binding fragment is specific for the N-terminal domain of Gal3, N-terminus of Gal3, or the TRD of Gal3. In some embodiments, the virus-associated host cell receptor is a SARS-CoV-2 associated host cell receptor. In some embodiments, the virus-associated host cell receptor is ACE2 or CD147. In some embodiments, the method provided herein can be used in a subject that has a viral infection. In some embodiments, the anti-Gal3 antibody or binding fragment thereof comprises or includes any one or more of the sequences described herein or provided in any one or more of FIG. 8, 9, 10, 11, 12, 13, 14, 15, 16, 17, or 18 or any one or more of a sequence that is at least 80%, 81%, 82%, 83%, 84%, 85%, 86%, 87%, 88%, 89%, 90%, 91%, 92%, 93%, 94%, 95%, 96%, 97%, 98%, 99% or greater identical thereto.

[0287] In some embodiments, a method of disrupting an interaction between Gal3 and a virus protein is provided. The method comprises contacting the viral protein with a protein. In some embodiments, the protein is an anti-Gal3 antibody or binding fragment thereof. In some embodiments, the anti-Gal3 antibody or binding fragment is specific for the N-terminal domain of Gal3, N-terminus of Gal3, or the TRD of Gal3. In some embodiments, the virus protein is a coronavirus protein. In some embodiments, the virus protein is a SARS-related coronavirus protein. In some embodiments, the virus protein is a SARS-CoV-2 coronavirus protein. In some embodiments, the virus protein is a SARS-CoV-2 spike (S) protein. In some embodiments, the anti-Gal3 antibody or binding fragment thereof comprises or includes any one or more of the sequences described herein or provided in any one or more of FIG. 8, 9, 10, 11, 12, 13, 14, 15, 16, 17, or 18 or any one or more of a sequence that is at least 80%, 81%, 82%, 83%, 84%, 85%, 86%, 87%, 88%, 89%, 90%, 91%, 92%, 93%, 94%, 95%, 96%, 97%, 98%, 99% or greater identical thereto.

[0288] In some embodiments, a method of treating a SARS-CoV-2 infection in a subject in need thereof is provided. The method comprises administering to the subject an effective amount of a protein. In some embodiments, the protein is an anti-Gal3 antibody or binding fragment thereof. In some embodiments, the anti-Gal3 antibody or binding fragment is specific for the N-terminal domain of Gal3, N-terminus of Gal3, or the TRD of Gal3. In some embodiments, the anti-Gal3 antibody or binding fragment thereof disrupts an interaction between Gal3 and a SARS-CoV-2-associated host cell receptor. In some embodiments, the SARS-CoV-2 associated host cell receptor is ACE2 or CD147. In some embodiments, the anti-Gal3 antibody or binding fragment thereof disrupts an interaction between Gal3 and a SARS-CoV-2 protein. In some embodiments, the SARS-CoV-2 protein is a SARS-CoV-2 S protein. In some embodiments, the anti-Gal3 antibody or binding fragment thereof comprises or includes any one or more of the sequences described herein or provided in any one or more of FIG. 8, 9, 10, 11, 12, 13, 14, 15, 16, 17, or 18 or any one or more of a sequence that is at least 80%, 81%, 82%, 83%, 84%, 85%, 86%, 87%, 88%, 89%, 90%, 91%, 92%, 93%, 94%, 95%, 96%, 97%, 98%, 99% or greater identical thereto.

[0289] In some embodiments, a method of treating a viral infection in a subject in need thereof is provided. The method comprises administering to the subject an effective amount of a protein. In some embodiments, the protein is an anti-Gal3 antibody or binding fragment thereof. In some embodiments, the anti-Gal3 antibody or binding fragment is specific for the N-terminal domain of Gal3, N-terminus of Gal3, or the TRD of Gal3. In some embodiments, the anti-Gal3 antibody or binding fragment thereof disrupts an interaction between Gal3 and a viral protein. In some embodiments, the viral infection is a coronavirus infection and the viral protein is a coronavirus protein. In some embodiments, the viral infection is a SARS-related coronavirus infection and the viral protein is a SARS-related coronavirus protein. In some embodiments, the viral infection is a SARS-CoV-2 viral infection and the viral protein is a SARS-CoV-2 S protein. In some embodiments, the anti-Gal3 antibody or binding fragment thereof comprises or includes any one or more of the sequences described herein or provided in any one or more of FIG. 8, 9, 10, 11, 12, 13, 14, 15, 16, 17, or 18 or any one or more of a sequence that is at least 80%, 81%, 82%, 83%, 84%, 85%, 86%, 87%, 88%, 89%, 90%, 91%, 92%, 93%, 94%, 95%, 96%, 97%, 98%, 99% or greater identical thereto.

[0290] In some embodiments, a method of treating a SARS-CoV-2 infection is provided. The method comprises administering to a subject an effective amount of a protein. In some embodiments, the protein is an anti-Gal3 antibody or binding fragment thereof. In some embodiments, the anti-Gal3 antibody or binding fragment is specific for the N-terminal domain of Gal3, N-terminus of Gal3, or the TRD of Gal3. The anti-Gal3 antibody or binding fragment thereof disrupts an interaction between Gal3 and a SARS-CoV-2 S protein. In some embodiments, the anti-Gal3 antibody is capable of binding to Gal3 on a SARS-CoV-2 virus, or Gal3 associated with a cell. In some embodiments, the Gal3 associated with a cell is a Gal3 expressed by the cell. In some embodiments, the Gal3 associated with a cell is a Gal3 bound to the cell surface. In some embodiments, the anti-Gal3 antibody or binding fragment thereof comprises or includes any one or more of the sequences described herein or provided in any one or more of FIG. 8, 9, 10, 11, 12, 13, 14, 15, 16, 17, 18 or any one or more of a sequence that is at least 80%, 81%, 82%, 83%, 84%, 85%, 86%, 87%, 88%, 89%, 90%, 91%, 92%, 93%, 94%, 95%, 96%, 97%, 98%, 99% or greater identical thereto.

[0291] In some embodiments, a method of preventing and/or reducing a viral spread is provided. The method comprises administering to a subject an effective amount of a protein. In some embodiments, the protein is an anti-Gal3 antibody or binding fragment thereof. In some embodiments, the anti-Gal3 antibody or binding fragment is specific for the N-terminal domain of Gal3, N-terminus of Gal3, or the TRD of Gal3. The anti-Gal3 antibody or binding fragment thereof disrupts an interaction between Gal3 and ACE2 and/or Gal3 and CD147. The method described herein can be applied to any subject that has a viral infection. In some embodiments, the anti-Gal3 antibody or binding fragment thereof comprises or includes any one or more of the sequences described herein or provided in any one or more of FIG. 8, 9, 10, 11, 12, 13, 14, 15, 16, 17, or 18 or any one or more of a sequence that is at least 80%, 81%, 82%, 83%, 84%, 85%, 86%, 87%, 88%, 89%, 90%, 91%, 92%, 93%, 94%, 95%, 96%, 97%, 98%, 99% or greater identical thereto.

[0292] In some embodiments, a method of reducing a risk that a virus can invade a cell is provided. The method comprises administering to a cell a protein. In some embodiments, the protein is an anti-Gal3 antibody or binding fragment thereof. In some embodiments, the anti-Gal3 antibody or binding fragment is specific for the N-terminal domain of Gal3, N-terminus of Gal3, or the TRD of Gal3. The anti-Gal3 antibody or binding fragment thereof disrupts an interaction between Gal3 and ACE2 and/or Gal3 and CD147. The method described herein can be applied to any cell and any virus. In some embodiments, the anti-Gal3 antibody or binding fragment thereof comprises or includes any one or more of the sequences described herein or provided in any one or more of FIG. 8, 9, 10, 11, 12, 13, 14, 15, 16, 17, or 18 or any one or more of a sequence that is at least 80%, 81%, 82%, 83%, 84%, 85%, 86%, 87%, 88%, 89%, 90%, 91%, 92%, 93%, 94%, 95%, 96%, 97%, 98%, 99% or greater identical thereto.

[0293] In some embodiments, a method of decreasing or inhibiting toxicity in a subject experiencing cytokine release syndrome (cytokine storm) or vulnerable to CRS is provided. The method comprises administering to the subject an effective amount of a protein. In some embodiments, the protein is an anti-Gal3 antibody or binding fragment thereof. In some embodiments, the anti-Gal3 antibody or binding fragment thereof is specific for the N-terminal domain of Gal3, N-terminus of Gal3, or the TRD of Gal3. In some embodiments, the CRS is a result of a bacterial infection, viral infection, fungal infection, protozoan infection, graft-versus-host disease, cytomegalovirus, Epstein-Barr virus, hemophagocytic lymphohistiocystosis (HLH), Epstein-Barr virus-associated HLH, sporadic HLH, macrophage activation syndrome (MAS), chronic arthritis, systemic Juvenile idiopathic Arthritis (sJIA), Still's Disease, Cryopyrin-associated Periodic Syndrome (CAPS), Familial Cold Auto-inflammatory Syndrome (FCAS), Familial Cold Urticaria (FCU), Muckle-Well Syndrome (MWS), Chronic Infantile Neurological Cutaneous and Articular (CINCA) Syndrome, cryopyrinopathy comprising inherited or de novo gain of function mutations in the NLRP3 gene, a hereditary auto-inflammatory disorder, acute pancreatitis, severe burns, trauma, acute respiratory distress syndrome (ARDS), Streptococcus, Pseudomonas, influenza, bird flu, H5N1, H1N1, variola virus, coronavirus, severe acute respiratory syndrome (SARS), SARS-CoV-1, SARS-CoV-2, sepsis, gram-negative sepsis, Gram-positive toxins, malaria, Ebola virus, variola virus, systemic Gram-negative bacterial infection, bacteremia, Jarisch-Herxheimer syndrome, glycosylphosphatidylinositol (GPI), or lipopolysaccharide, or treatment with an immunotherapy comprising rituximab, obinutuzumab, alemtuzumab, brentuximab, dacetuzumab, nivolumab, theralizumab, oxaliplatin, lenalidomide, T-cell engager molecules, bi-specific T-cell engager (BiTE) molecules, or CAR T therapy. In some embodiments, the CRS is a result of sepsis. In some embodiments, the sepsis is bacterial sepsis, viral sepsis, fungal sepsis, or protozoan sepsis. In some embodiments, the CRS is a result of a viral infection. In some embodiments, the CRS is a result of a coronavirus infection. In some embodiments, the CRS is a result of a SARS-related coronavirus infection. In some embodiments, the CRS is a result of a SARS-CoV-2 coronavirus infection. In some embodiments, the anti-Gal3 antibody or binding fragment thereof comprises or includes any one or more of the sequences described herein or provided in any one or more of FIG. 8, 9, 10, 11, 12, 13, 14, 15, 16, 17, or 18 or any one or more of a sequence that is at least 80%, 81%, 82%, 83%, 84%, 85%, 86%, 87%, 88%, 89%, 90%, 91%, 92%, 93%, 94%, 95%, 96%, 97%, 98%, 99% or greater identical thereto.

[0294] In some embodiments, a method of decreasing or inhibiting inflammation in a subject in need thereof is provided. The method comprises administering to the subject an effective amount of a protein. In some embodiments, the protein is an anti-Gal3 antibody or binding fragment thereof. In some embodiments, the anti-Gal3 antibody or binding fragment thereof is specific for the N-terminus of Gal3, the N-terminal domain of Gal3, or the TRD of Gal3. In some embodiments, the inflammation in the subject is associated with neutrophil activation and/or migration. In some embodiments, administration of the effective amount of the anti-Gal3 antibody or binding fragment thereof decreases or inhibits neutrophil activation and/or migration in the subject. In some embodiments, administration of the effective amount of the anti-Gal3 antibody or binding fragment thereof decreases or inhibits cleavage of CD62L expressed by neutrophils and/or decreases or inhibits IL-8 production in the subject. In some embodiments, the method further comprise detecting a decrease in neutrophil CD62L cleavage and/or a decrease in IL-8 production in the subject after the administering step. In some embodiments, administration of the effective amount of the anti-Gal3 antibody or binding fragment thereof decreases the number of neutrophils in the subject. In some embodiments, the method further comprises detecting a decrease in the number of neutrophils in the subject after the administering step. In some embodiments, administration of the effective amount of the anti-Gal3 antibody or binding fragment thereof modulates (e.g. increases, decreases, or inhibits) expression of Gal3, myeloperoxidase (MPO), growth-related oncogene α (GROα)/keratinocytes-derived chemokine (KC), Ly6c1, INOS, IL-6, TNFα, IL-1B, Col1A1, aSMA, TGFβ, VEGFA, VEGFB, or any combination thereof, in the subject. In some embodiments, the method further comprises detecting a change (e.g. increase or decrease) in expression of Gal3, MPO, GROα/KC, Ly6c1, INOS, IL-6, TNFα, IL-1B, Col1A1, aSMA, TGFβ, VEGFA, VEGFB, or any combination thereof, in the subject after the administrating step. In some embodiments, administration of the effective amount of the anti-Gal3 antibody or binding fragment thereof decreases production of autoantibodies in the subject. In some embodiments, the autoantibodies are anti-nucleic acid autoantibodies. In some embodiments, the inflammation comprises lung inflammation. In some embodiments, the inflammation comprises COPD, pneumonitis, asthma, sarcoidosis, pulmonary fibrosis, histiocytosis, bronchiolitis obliterans, or any combination thereof. In some embodiments, the inflammation comprises an autoimmune disease. In some embodiments, the autoimmune disease comprises systemic lupus erythematosus (SLE), Graves' disease, rheumatoid arthritis, multiple sclerosis, Sjogren's syndrome, celiac disease, or any combination thereof. In some embodiments, the method further comprises detecting an improvement in the inflammation in the subject after the administrating step.

[0295] In some embodiments, a method of decreasing or inhibiting cleavage of CD62L, decreasing IL-8 production, and/or modulating (e.g. increasing or decreasing) expression of Gal3, MPO, GROα/KC, Ly6c1, INOS, IL-6, TNFα, IL-1B, Col1A1, aSMA, TGFβ, VEGFA, VEGFB, or any combination thereof, by a cell is disclosed. The method comprises contacting the cell with an anti-Gal3 antibody or binding fragment thereof, thereby decreasing or inhibiting cleavage of CD62L, decreasing IL-8 production, and/or modulating expression of Gal3, MPO, GROα/KC, Ly6c1, INOS, IL-6, TNFα, IL-1B, Col1A1, aSMA, TGFβ, VEGFA, VEGFB, or any combination thereof, by the cell. In some embodiments, the cell is an immune cell. In some embodiments, the cell is a neutrophil. In some embodiments, cleavage of CD62L is decreased by at least 60%, 65%, 70%, 75%, 80%, 85%, 90%, 95%, 96%, 97%, 98%, 99%, or 100%, IL-8 production is decreased by at least 1%, 2%, 3%, 4%, 5%, 10%, 15%, 20%, 25%, 30%, 35%, 40%, 45%, 50%, 55%, 60%, 65%, 70%, 75%, 80%, 85%, 90%, 95%, or 100%, TNFα expression is decreased by at least 10%, 15%, 20%, 25%, 30%, 35%, 40%, 45%, 50%, 55%, 60%, 65%, 70%, 75%, 80%, 85%, 90%, 95%, or 100%, and/or IL-6 expression is decreased by at least 10%, 15%, 20%, 25%, 30%, 35%, 40%, 45%, 50%, 55%, 60%, 65%, 70%, 75%, 80%, 85%, 90%, 95%, or 100%. In some embodiments, the decrease or inhibition of cleavage of CD62L, decrease in IL-8 production, and/or change (e.g. increase or decrease) in expression of Gal3, MPO, GROα/KC, Ly6c1, INOS, IL-6, TNFα, IL-1B, Col1A1, aSMA, TGFβ, VEGFA, VEGFB, or any combination thereof is determined by ELISA. In some embodiments, the anti-Gal3 antibody or binding fragment thereof comprises or includes any one or more of the sequences described herein or provided in any one or more of FIG. 8, 9, 10, 11, 12, 13, 14, 15, 16, 17, or 18 or any one or more of a sequence that is at least 80%, 81%, 82%, 83%, 84%, 85%, 86%, 87%, 88%, 89%, 90%, 91%, 92%, 93%, 94%, 95%, 96%, 97%, 98%, 99% or greater identical thereto.

[0296] In some embodiments, a method of detecting Gal3 in a sample is provided. The method comprises contacting the sample with a protein and detecting the presence or absence of Gal3. In some embodiments, the protein is an anti-Gal3 antibody or binding fragment thereof. In some embodiments, the anti-Gal3 antibody or binding fragment comprises a detectable moiety. In some embodiments, the anti-Gal3 antibody or binding fragment is specific for the N-terminal domain of Gal3, N-terminus of Gal3, or the TRD of Gal3. In some embodiments, the anti-Gal3 antibody or binding fragment thereof comprises or includes any one or more of the sequences described herein or provided in any one or more of FIG. 8, 9, 10, 11, 12, 13, 14, 15, 16, 17, or 18 or any one or more of a sequence that is at least 80%, 81%, 82%, 83%, 84%, 85%, 86%, 87%, 88%, 89%, 90%, 91%, 92%, 93%, 94%, 95%, 96%, 97%, 98%, 99% or greater identical thereto.

[0297] In some embodiments of the methods described herein, the anti-Gal3 antibody or binding fragment thereof binds to the N-terminus of Gal3, the N-terminal domain of Gal3, or the tandem repeat domain (TRD) of Gal3, or any combination thereof. In some embodiments of the methods described herein, the anti-Gal3 antibody or binding fragment thereof binds to Peptide 1 (ADNFSLHDALSGSGNPNPQG; SEQ ID NO: 3), Peptide 6 (GAYPGQAPPGAYPGAPGAYP; SEQ ID NO: 8), or Peptide 7 (AYPGAPGAYPGAPAPGVYPG; SEQ ID NO: 9), or any combination thereof. In some embodiments of the methods described herein, the anti-Gal3 antibody or binding fragment thereof comprises (1) a light chain variable region comprising a V_{L}-CDR1, a V_{L}-CDR2, and a V_{L}-CDR3; and (2) a heavy chain variable region comprising a V_{H}-CDR1, a V_{H}-CDR2, and a V_{H}-CDR3, wherein the V_{L}-CDR1 comprises an amino acid sequence having at least 60%, at least 70%, at least 80%, at least 90%, or 100% sequence identity to any amino acid sequence according to SEQ ID NOs: 170-220, the V_{L}-CDR2 comprises an amino acid sequence having at least 60%, at least 70%, at least 80%, at least 90%, or 100% sequence identity to any amino acid sequence according to SEQ ID NOs: 221-247, the V_{L}-CDR3 comprises an amino acid sequence having at least 60%, at least 70%, at least 80%, at least 90%, or 100% sequence identity to any amino acid sequence according to SEQ ID NOs: 248-296, the V_{H}-CDR1 comprises an amino acid sequence having at least 60%, at least 70%, at least 80%, at least 90%, or 100% sequence identity to any amino acid sequence according to SEQ ID NOs: 27-70, the V_{H}-CDR2 comprises an amino acid sequence having at least 60%, at least 70%, at least 80%, at least 90%, or 100% sequence identity to any amino acid sequence according to SEQ ID NOs: 71-111, 826, and the V_{H}-CDR3 comprises an amino acid sequence having at least 60%, at least 70%, at least 80%, at least 90%, or 100% sequence identity to any amino acid sequence according to SEQ ID NOs: 112-169, 827. In some embodiments of the methods described herein, the anti-Gal3 antibody or binding fragment comprises a combination of a V_{L}-CDR1, a V_{L}-CDR2, a V_{L}-CDR3, a V_{H}-CDR1, a V_{H}-CDR2, and a V_{H}-CDR3 as illustrated in FIG. 14. In some embodiments of the methods described herein, the light chain variable region comprises a sequence having at least 80%, 81%, 82%, 83%, 84%, 85%, 86%, 87%, 88%, 89%, 90%, 91%, 92%, 93%, 94%, 95%, 96%, 97%, 98%, or 99% identity to the sequence selected from SEQ ID NOs: 374-449. In some embodiments of the methods described herein, the light chain variable region comprises the sequence selected from SEQ ID NOs: 374-449. In some embodiments of the methods described herein, the heavy chain variable region comprises a sequence having at least 80%, 81%, 82%, 83%, 84%, 85%, 86%, 87%, 88%, 89%, 90%, 91%, 92%, 93%, 94%, 95%, 96%, 97%, 98%, or 99% identity to the sequence selected from SEQ ID NOs: 297-373, 822, 828. In some embodiments of the methods described herein, the heavy chain variable region comprises the sequence selected from SEQ ID NOs: 297-373, 822, 828. In some embodiments of the methods described herein, the anti-Gal3 antibody or binding fragment thereof comprises a light chain, wherein the light chain comprises a sequence having at least 80%, 81%, 82%, 83%, 84%, 85%, 86%, 87%, 88%, 89%, 90%, 91%, 92%, 93%, 94%, 95%, 96%, 97%, 98%, or 99% identity to the sequence selected from SEQ ID NOs: 495-538, 830. In some embodiments of the methods described herein, the light chain comprises the sequence selected from SEQ ID NOs: 495-538, 830. In some embodiments of the methods described herein, the anti-Gal3 antibody or binding fragment thereof comprises a heavy chain, wherein the heavy chain comprises a sequence having at least 80%, 81%, 82%, 83%, 84%, 85%, 86%, 87%, 88%, 89%, 90%, 91%, 92%, 93%, 94%, 95%, 96%, 97%, 98%, or 99% identity to the sequence selected from SEQ ID NOs: 448-494, 829. In some embodiments of the methods described herein, the heavy chain comprises the sequence selected from SEQ ID NOs: 448-494, 829. In some embodiments of the methods described herein, the anti-Gal3 antibody or binding fragment thereof is selected from the group consisting of: TB001, TB006, 12G5.D7, 13A12.2E5, 14H10.2C9, 15F10.2D6, 19B5.2E6, 20D11.2C6, 20H5.A3, 23H9.2E4, 2D10.2B2, 3B11.2G2, 7D8.2D8, mIMT001, 4A11.2B5, 4A11.H1L1, 4A11.H4L2, 4G2.2G6, 6B3.2D3, 6H6.2D6, 9H2.2H10, 13G4.2F8, 13H12.2F8, 15G7.2A7, 19D9.2E5, 23B10.2B12, 24D12.2H9, F846C.1B2, F846C.1F5, F846C.1H12, F846C.1H5, F846C.2H3, F846TC.14A2, F846TC.14E4, F846TC.16B5, F846TC.7F10, F847C.10B9, F847C.11B1, F847C.12F12, F847C.26F5, F847C.4B10, F849C.8D10, F849C.8H3, 846.2B11, 846.4D5, 846T.1H2, 847.14H4, 846.2D4, 846.2F11, 846T.10B1, 846T.2E3, 846T.4C9, 846T.4E11, 846T.4F5, 846T.8D1, 847.10C9, 847.11D6, 847.15D12, 847.15F9, 847.15H11, 847.20H7, 847.21B11, 847.27B9, 847.28D1, 847.2B8, 847.3B3, 849.1D2, 849.2D7, 849.2F12, 849.4B2, 849.4F12, 849.4F2, 849.5C2, 849.8D12, F847C.21H6, 849.5H1, 847.23F11, 847.16D10, 847.13E2-mH0mL1, 847.13E2-mH0mL2, 847.12C4, 847.4D3, 2D10-VH0-VL0, or binding fragment thereof.

[0298] In some embodiments of the methods described herein, the anti-Gal3 antibody or binding fragment thereof is administered with one or more antiviral or anti-inflammatory therapeutics. In some embodiments, the one or more antiviral or anti-inflammatory therapeutics is selected from the group consisting of chloroquine, hydroxychloroquine, favipiravir, favilavir, remdesivir, tocilizumab, baricitinib, acalabrutinib, galidesivir, sarilumab, lopinavir, ritonavir, darunavir, ribavirin, dexamethasone, ciclesonide, convalescent plasma, interferon-α, pegylated interferon-α, and interferon alfa-2b, or any combination thereof.

[0299] In some embodiments, a use of an anti-Gal3 antibody or binding fragment thereof for the treatment of a viral infection is provided. In some embodiments, a use of an anti-Gal3 antibody or binding fragment thereof for the treatment of lung fibrosis is provided, where the lung fibrosis is a sequela of a viral infection. In some embodiments, the use of an anti-Gal3 antibody or binding fragment thereof for the treatment of CRS is provided. In some embodiments, the CRS is a result of a viral infection. In some embodiments, the CRS is a result of sepsis. In some embodiments, the CRS is a result of bacterial sepsis, viral sepsis, fungal sepsis, or protozoan sepsis. In some embodiments, the viral infection is a coronavirus infection. In some embodiments, the viral infection is a SARS-related coronavirus infection. In some embodiments, the viral infection is a SARS-CoV-2 coronavirus infection. In some embodiments, the anti-Gal3 antibody or binding fragment thereof binds to the N-terminus of Gal3. In some embodiments, the anti-Gal3 antibody or binding fragment thereof binds to the N-terminal domain of Gal3. In some embodiments, the anti-Gal3 antibody or binding fragment thereof binds to the tandem repeat domain of Gal3. In some embodiments, the anti-Gal3 antibody or binding fragment thereof binds to Peptide 1 (ADNFSLHDALSGSGNPNPQG; SEQ ID NO: 3), Peptide 6 (GAYPGQAPPGAYPGAPGAYP; SEQ ID NO: 8), or Peptide 7 (AYPGAPGAYPGAPAPGVYPG; SEQ ID NO: 9), or any combination thereof. In some embodiments, the anti-Gal3 antibody or binding fragment thereof comprises (1) a light chain variable region comprising a V_{L}-CDR1, a V_{L}-CDR2, and a V_{L}-CDR3; and (2) a heavy chain variable region comprising a V_{H}-CDR1, a V_{H}-CDR2, and a V_{H}-CDR3, wherein the V_{L}-CDR1 comprises an amino acid sequence having at least 60%, at least 70%, at least 80%, at least 90%, or 100% sequence identity to any amino acid sequence according to SEQ ID NOs: 170-220, the V_{L}-CDR2 comprises an amino acid sequence having at least 60%, at least 70%, at least 80%, at least 90%, or 100% sequence identity to any amino acid sequence according to SEQ ID NOs: 221-247, the V_{L}-CDR3 comprises an amino acid sequence having at least 60%, at least 70%, at least 80%, at least 90%, or 100% sequence identity to any amino acid sequence according to SEQ ID NOs: 248-296, the V_{H}-CDR1 comprises an amino acid sequence having at least 60%, at least 70%, at least 80%, at least 90%, or 100% sequence identity to any amino acid sequence according to SEQ ID NOs: 27-70, the V_{H}-CDR2 comprises an amino acid sequence having at least 60%, at least 70%, at least 80%, at least 90%, or 100% sequence identity to any amino acid sequence according to SEQ ID NOs: 71-111, 826, and the V_{H}-CDR3 comprises an amino acid sequence having at least 60%, at least 70%, at least 80%, at least 90%, or 100% sequence identity to any amino acid sequence according to SEQ ID NOs: 112-169, 827. In some embodiments, the anti-Gal3 antibody or binding fragment comprises a combination of a V_{L}-CDR1, a V_{L}-CDR2, a V_{L}-CDR3, a V_{H}-CDR1, a V_{H}-CDR2, and a V_{H}-CDR3 as illustrated in FIG. 14. In some embodiments, the light chain variable region comprises a sequence having at least 80%, 81%, 82%, 83%, 84%, 85%, 86%, 87%, 88%, 89%, 90%, 91%, 92%, 93%, 94%, 95%, 96%, 97%, 98%, or 99% identity to the sequence selected from SEQ ID NOs: 374-449. In some embodiments, the light chain variable region comprises the sequence selected from SEQ ID NOs: 374-449. In some embodiments, the heavy chain variable region comprises a sequence having at least 80%, 81%, 82%, 83%, 84%, 85%, 86%, 87%, 88%, 89%, 90%, 91%, 92%, 93%, 94%, 95%, 96%, 97%, 98%, or 99% identity to the sequence selected from SEQ ID NOs: 297-373, 822, 828. In some embodiments, the heavy chain variable region comprises the sequence selected from SEQ ID NOs: 297-373, 822, 828. In some embodiments, the anti-Gal3 antibody or binding fragment thereof comprises a light chain, wherein the light chain comprises a sequence having at least 80%, 81%, 82%, 83%, 84%, 85%, 86%, 87%, 88%, 89%, 90%, 91%, 92%, 93%, 94%, 95%, 96%, 97%, 98%, or 99% identity to the sequence selected from SEQ ID NOs: 495-538, 830. In some embodiments, the light chain comprises the sequence selected from SEQ ID NOs: 495-538, 830. In some embodiments, the anti-Gal3 antibody or binding fragment thereof comprises a heavy chain, wherein the heavy chain comprises a sequence having at least 80%, 81%, 82%, 83%, 84%, 85%, 86%, 87%, 88%, 89%, 90%, 91%, 92%, 93%, 94%, 95%, 96%, 97%, 98%, or 99% identity to the sequence selected from SEQ ID NOs: 448-494, 829. In some embodiments, the heavy chain comprises the sequence selected from SEQ ID NOs: 448-494, 829. In some embodiments, the anti-Gal3 antibody or binding fragment thereof is selected from the group consisting of: TB001, TB006, 12G5.D7, 13A12.2E5, 14H10.2C9, 15F10.2D6, 19B5.2E6, 20D11.2C6, 20H5.A3, 23H9.2E4, 2D10.2B2, 3B11.2G2, 7D8.2D8, mIMT001, 4A11.2B5, 4A11.H1L1, 4A11.H4L2, 4G2.2G6, 6B3.2D3, 6H6.2D6, 9H2.2H10, 13G4.2F8, 13H12.2F8, 15G7.2A7, 19D9.2E5, 23B10.2B12, 24D12.2H9, F846C.1B2, F846C.1F5, F846C.1H12, F846C.1H5, F846C.2H3, F846TC.14A2, F846TC.14E4, F846TC.16B5, F846TC.7F10, F847C.10B9, F847C.11B1, F847C.12F12, F847C.26F5, F847C.4B10, F849C.8D10, F849C.8H3, 846.2B11, 846.4D5, 846T.1H2, 847.14H4, 846.2D4, 846.2F11, 846T.10B1, 846T.2E3, 846T.4C9, 846T.4E11, 846T.4F5, 846T.8D1, 847.10C9, 847.11D6, 847.15D12, 847.15F9, 847.15H11, 847.20H7, 847.21B11, 847.27B9, 847.28D1, 847.2B8, 847.3B3, 849.1D2, 849.2D7, 849.2F12, 849.4B2, 849.4F12, 849.4F2, 849.5C2, 849.8D12, F847C.21H6, 849.5H1, 847.23F11, 847.16D10, 847.13E2-mH0mL1, 847.13E2-mH0mL2, 847.12C4, 847.4D3, 2D10-VH0-VL0, or binding fragment thereof. In some embodiments, the anti-Gal3 antibody or binding fragment thereof comprises or includes any one or more of the sequences described herein or provided in any one or more of FIG. 8, 9, 10, 11, 12, 13, 14, 15, 16, 17, or 18 or any one or more of a sequence that is at least 80%, 81%, 82%, 83%, 84%, 85%, 86%, 87%, 88%, 89%, 90%, 91%, 92%, 93%, 94%, 95%, 96%, 97%, 98%, 99% or greater identical thereto.

[0300] In some embodiments, any one or more of the antibodies or fragments thereof provided herein can be used for the treatment and/or prevention of any one or more of: a cytokine storm, influenza, bird flu, severe acute respiratory syndrome (SARS), Epstein-Barr virus-associated hemophagocytic lymphohistiocytosis (HLH), sepsis, gram-negative sepsis, malaria, an Ebola virus, a variola virus, a systemic Gram-negative bacterial infection, or Jarisch-Herxheimer syndrome, hemophagocytic lymphohistiocytosis (HLH), sporadic HLH, macrophage activation syndrome (MAS), chronic arthritis, systemic Juvenile idiopathic Arthritis (sJIA), Still's Disease, a Cryopyrin-associated Periodic Syndrome (CAPS), Familial Cold Auto-inflammatory Syndrome (FCAS), Familial Cold Urticaria (FCU), Muckle-Well Syndrome (MWS), Chronic Infantile Neurological Cutaneous and, Articular (CINCA) Syndrome, a cryopyrinopathy comprising inherited or de novo gain of function mutations in the NLRP3 gene, a hereditary auto-inflammatory disorder, acute pancreatitis, a severe burns, a trauma, an acute respiratory distress syndrome, an immunotherapy, a monoclonal antibody therapy, secondary to drug use, is secondary to inhalation of toxins, a lipopolysaccharide (LPS), a Gram-positive toxins, fungal toxins, glycosylphosphatidylinositol (GPI), or modulation of RIG-1 gene expression.

[0301] Some embodiments described herein relate to pharmaceutical compositions that comprise, consist essentially of, or consist of an effective amount of an anti-Gal3 antibody or binding fragment described herein and a pharmaceutically acceptable carrier, excipient, or combination thereof. A pharmaceutical composition described herein is suitable for human and/or veterinary applications.

[0302] In some embodiments, any of the pharmaceutical antibody formulations disclosed herein are administered for therapeutic applications. In some embodiments, these can be used for the treatment of a disease such as a coronavirus infection or inflammation associated with said disease.

[0303] In some embodiments, the pharmaceutical antibody formulation administered for therapeutic applications comprises a therapeutically effective amount of an antibody, where the antibody comprises a V_{H}-CDR1 having the sequence of SEQ ID NO: 31, a V_{H}-CDR2 having the sequence of SEQ ID NO: 72, a V_{H}-CDR3 having the sequence of SEQ ID NO: 113, a V_{L}-CDR1 having the sequence of SEQ ID NO: 171, a V_{L}-CDR2 having the sequence of SEQ ID NO: 222; and a V_{L}-CDR3 having the sequence of SEQ ID NO: 249, where the antibody is present at an amount of 1 mg as a unit dose, L-histidine present at 20 mM, methionine present at 5 mM, NaCl present at 100 mM, polysorbate 80 present at 0.02% and where the pH is about 5.8.

[0304] In some embodiments, the pharmaceutical antibody formulation administered for therapeutic applications comprises a therapeutically effective amount of an antibody, where the antibody comprises a V_{H}-CDR1 having the sequence of SEQ ID NO: 31, a V_{H}-CDR2 having the sequence of SEQ ID NO: 72, a V_{H}-CDR3 having the sequence of SEQ ID NO: 113, a V_{L}-CDR1 having the sequence of SEQ ID NO: 171, a V_{L}-CDR2 having the sequence of SEQ ID NO: 222; and a V_{L}-CDR3 having the sequence of SEQ ID NO: 249, where the antibody is present at an amount of 5 mg as a unit dose, L-histidine present at 20 mM, methionine present at 5 mM, NaCl present at 100 mM, polysorbate 80 present at 0.02% and where the pH is about 5.8.

[0305] In some embodiments, the pharmaceutical antibody formulation administered for therapeutic applications comprises a therapeutically effective amount of an antibody, where the antibody comprises a V_{H}-CDR1 having the sequence of SEQ ID NO: 31, a V_{H}-CDR2 having the sequence of SEQ ID NO: 72, a V_{H}-CDR3 having the sequence of SEQ ID NO: 113, a V_{L}-CDR1 having the sequence of SEQ ID NO: 171, a V_{L}-CDR2 having the sequence of SEQ ID NO: 222; and a V_{L}-CDR3 having the sequence of SEQ ID NO: 249, where the antibody is present at an amount of 10 mg as a unit dose, L-histidine present at 20 mM, methionine present at 5 mM, NaCl present at 100 mM, polysorbate 80 present at 0.02% and where the pH is about 5.8.

[0306] In some embodiments, the pharmaceutical antibody formulation administered for therapeutic applications comprises a therapeutically effective amount of an antibody, where the antibody comprises a V_{H}-CDR1 having the sequence of SEQ ID NO: 31, a V_{H}-CDR2 having the sequence of SEQ ID NO: 72, a V_{H}-CDR3 having the sequence of SEQ ID NO: 113, a V_{L}-CDR1 having the sequence of SEQ ID NO: 171, a V_{L}-CDR2 having the sequence of SEQ ID NO: 222; and a V_{L}-CDR3 having the sequence of SEQ ID NO: 249, where the antibody is present at an amount of 20 mg as a unit dose, L-histidine present at 20 mM, methionine present at 5 mM, NaCl present at 100 mM, polysorbate 80 present at 0.02% and where the pH is about 5.8.

[0307] In some embodiments, the pharmaceutical antibody formulation administered for therapeutic applications comprises a therapeutically effective amount of an antibody, where the antibody comprises a V_{H}-CDR1 having the sequence of SEQ ID NO: 31, a V_{H}-CDR2 having the sequence of SEQ ID NO: 72, a V_{H}-CDR3 having the sequence of SEQ ID NO: 113, a V_{L}-CDR1 having the sequence of SEQ ID NO: 171, a V_{L}-CDR2 having the sequence of SEQ ID NO: 222; and a V_{L}-CDR3 having the sequence of SEQ ID NO: 249, where the antibody is present at an amount of 40 mg as a unit dose, L-histidine present at 20 mM, methionine present at 5 mM, NaCl present at 100 mM, polysorbate 80 present at 0.02% and where the pH is about 5.8.

[0308] In some embodiments, the pharmaceutical antibody formulation administered for therapeutic applications comprises a therapeutically effective amount of an antibody, where the antibody comprises a V_{H}-CDR1 having the sequence of SEQ ID NO: 31, a V_{H}-CDR2 having the sequence of SEQ ID NO: 72, a V_{H}-CDR3 having the sequence of SEQ ID NO: 113, a V_{L}-CDR1 having the sequence of SEQ ID NO: 171, a V_{L}-CDR2 having the sequence of SEQ ID NO: 222; and a V_{L}-CDR3 having the sequence of SEQ ID NO: 249, where the antibody is present at an amount of 50 mg as a unit dose, L-histidine present at 20 mM, methionine present at 5 mM, NaCl present at 100 mM, polysorbate 80 present at 0.02% and where the pH is about 5.8.

[0309] In some embodiments, the pharmaceutical antibody formulation administered for therapeutic applications comprises a therapeutically effective amount of an antibody, where the antibody comprises a VH region having a sequence at least 80%, 85%, 90%, 95%, 99%, or 100% identical to that of SEQ ID NO: 298 and a VL region having a sequence at least 80%, 85%, 90%, 95%, 99%, or 100% identical to that of SEQ ID NO: 375, where the antibody is present at an amount of 1 mg as a unit dose, L-histidine present at 20 mM, methionine present at 5 mM, NaCl present at 100 mM, polysorbate 80 present at 0.02% and where the pH is about 5.8.

[0310] In some embodiments, the pharmaceutical antibody formulation administered for therapeutic applications comprises a therapeutically effective amount of an antibody, where the antibody comprises a VH region having a sequence at least 80%, 85%, 90%, 95%, 99%, or 100% identical to that of SEQ ID NO: 298 and a VL region having a sequence at least 80%, 85%, 90%, 95%, 99%, or 100% identical to that of SEQ ID NO: 375, where the antibody is present at an amount of 5 mg as a unit dose, L-histidine present at 20 mM, methionine present at 5 mM, NaCl present at 100 mM, polysorbate 80 present at 0.02% and where the pH is about 5.8.

[0311] In some embodiments, the pharmaceutical antibody formulation administered for therapeutic applications comprises a therapeutically effective amount of an antibody, where the antibody comprises a VH region having a sequence at least 80%, 85%, 90%, 95%, 99%, or 100% identical to that of SEQ ID NO: 298 and a VL region having a sequence at least 80%, 85%, 90%, 95%, 99%, or 100% identical to that of SEQ ID NO: 375, where the antibody is present at an amount of 10 mg as a unit dose, L-histidine present at 20 mM, methionine present at 5 mM, NaCl present at 100 mM, polysorbate 80 present at 0.02% and where the pH is about 5.8.

[0312] In some embodiments, the pharmaceutical antibody formulation administered for therapeutic applications comprises a therapeutically effective amount of an antibody, where the antibody comprises a VH region having a sequence at least 80%, 85%, 90%, 95%, 99%, or 100% identical to that of SEQ ID NO: 298 and a VL region having a sequence at least 80%, 85%, 90%, 95%, 99%, or 100% identical to that of SEQ ID NO: 375, where the antibody is present at an amount of 20 mg as a unit dose, L-histidine present at 20 mM, methionine present at 5 mM, NaCl present at 100 mM, polysorbate 80 present at 0.02% and where the pH is about 5.8.

[0313] In some embodiments, the pharmaceutical antibody formulation administered for therapeutic applications comprises a therapeutically effective amount of an antibody, where the antibody comprises a VH region having a sequence at least 80%, 85%, 90%, 95%, 99%, or 100% identical to that of SEQ ID NO: 298 and a VL region having a sequence at least 80%, 85%, 90%, 95%, 99%, or 100% identical to that of SEQ ID NO: 375, where the antibody is present at an amount of 40 mg as a unit dose, L-histidine present at 20 mM, methionine present at 5 mM, NaCl present at 100 mM, polysorbate 80 present at 0.02% and where the pH is about 5.8.

[0314] In some embodiments, the pharmaceutical antibody formulation administered for therapeutic applications comprises a therapeutically effective amount of an antibody, where the antibody comprises a VH region having a sequence at least 80%, 85%, 90%, 95%, 99%, or 100% identical to that of SEQ ID NO: 298 and a VL region having a sequence at least 80%, 85%, 90%, 95%, 99%, or 100% identical to that of SEQ ID NO: 375, where the antibody is present at an amount of 50 mg as a unit dose, L-histidine present at 20 mM, methionine present at 5 mM, NaCl present at 100 mM, polysorbate 80 present at 0.02% and where the pH is about 5.8.

[0315] In some embodiments, the pharmaceutical antibody formulation is administered once per day, twice per day, three times per day or more. In some embodiments, the pharmaceutical antibody formulation is administered daily, every day, every alternate day, every ten days, five days a week, once a week, every other week, two weeks per month, three weeks per month, once a month, twice a month, three times per month, or more. The pharmaceutical antibody formulation is administered for at least 1 month, 2 months, 3 months, 4 months, 5 months, 6 months, 7 months, 8 months, 9 months, 10 months, 11 months, 12 months, 13 months, 14 months, 15 months, 16 months, 17 months, 18 months, 19 months, 20 months, 2 years, 3 years, or more.

[0316] As applied to any of the methods disclosed herein, in some embodiments, the pharmaceutical antibody formulation is administered enterally, orally, intranasally, parenterally, intracranially, subcutaneously, intramuscularly, intradermally, or intravenously, or any combination thereof. In some embodiments, the pharmaceutical antibody formulation is administered intravenously or subcutaneously. In some embodiments, the subject is a mammal. In some embodiments, the subject is a human.

[0317] In some embodiments, any of the pharmaceutical antibody compositions provided herein are used in a method for treating a coronavirus infection. In some embodiments, the methods comprise administering the pharmaceutical antibody formulation of any one of the preceding pharmaceutical antibody formulation claims or sterile vial claims to a subject in need of treatment for a coronavirus infection. In some embodiments, the methods further comprise detecting an improvement in the coronavirus infection in the subject after administration. In some embodiments, the pharmaceutical antibody formulation is administered daily, weekly, bi-weekly, or every 10 days. In some embodiments, the subject is administered 1 mg, 5 mg, 10 mg, 20 mg, 40 mg, or 50 mg of antibody as a unit dose, or any amount of antibody as a unit dose within a range defined by any two of the aforementioned amounts. In some embodiments, the subject is administered 1 mg of antibody as a unit dose. In some embodiments, the subject is administered 5 mg of antibody as a unit dose. In some embodiments, the subject is administered 10 mg of antibody as a unit dose. In some embodiments, the subject is administered 20 mg of antibody as a unit dose. In some embodiments, the subject is administered 40 mg of antibody as a unit dose. In some embodiments, the subject is administered 50 mg of antibody as a unit dose. In some embodiments, the unit dose is administered over the course of 10, 20, 30, 40, 50, 60, 70, 80, 90, 100, 120, 130, 140, 150, 160, 170, 180, 190, or 200 minutes, or any time within a range defined by any two of the aforementioned times. In some embodiments, the unit dose is administered over the course of 60 minutes. In some embodiments, the method further comprise identifying the subject in need of treatment for a coronavirus infection prior to administration, such as having the coronavirus infection or at risk of contracting the coronavirus infection. In some embodiments, the step of identifying the subject as in need of treatment for a coronavirus infection may be done according to the following inclusion criteria:

[0318] 1) Willing and able to provide written informed consent prior to performing study or treatment procedures (or legally authorized representative able to provide consent on the patient's behalf).

[0319] 2) Age≥18 years.

[0320] 3) A positive SARS-CoV-2 infection confirmed by PCR test or an equivalent test ≤3 days before treatment.

[0321] 4) Patients with mild to moderate COVID-19 experience any of the following symptoms:

[0322] a) Mild (without shortness of breath or dyspnea): fever, cough, sore throat, malaise, headache, muscle pain, gastrointestinal symptoms.

[0323] b) Moderate: any symptom of mild illness, shortness of breath with excursion, clinically suggestive of moderate illness with COVID-19, such as respiratory rate ≥20 breaths per minute, saturation of oxygen (SpO₂)>93% on room air at sea level, heart rate ≥90 beats per minute.

[0324] 5) At high risk for progressing to severe COVID-19 and/or hospitalization. High risk patients are defined as meeting at least one of the following criteria: have diabetes, have hypertension, have cancer, body mass index≥35, have chronic kidney disease, are ≥65 years of age, are ≥55 years of age and have cardiovascular disease such as hypertension or chronic obstructive pulmonary disease/other chronic respiratory disease.

[0325] 6) Adequate organ function as evidenced by: hemoglobin >8 g/dL, absolute neutrophil count (ANC)>1.5×10⁹/L, platelets >50×10⁹/L, alanine aminotransferase (ALT) or aspartate aminotransferase (AST)<5.5× upper limit of normal (ULN), or creatinine clearance >50 mL/min using the Cockcroft-Gault formula for patients ≥18 years of age and Schwartz formula for patients <18 years of age.

[0326] In some embodiments, the step of identifying the subject in need of treatment for a coronavirus infection comprises one or more of identifying a positive coronavirus infection by PCR test or equivalent test, identifying the subject as having symptoms of fever, cough, sore throat, malaise, headache, muscle pain, gastrointestinal symptoms, shortness of breath with excursion, respiratory rate ≥20 breaths per minute, saturation of oxygen (SpO₂)>93% on room air at sea level, heart rate ≥90 beats per minute, diabetes, hypertension, cancer, chronic kidney disease, body mass index (BMI)≥35, ≥65 years of age, cardiovascular disease such as hypertension, chronic obstructive pulmonary disease or other chronic respiratory disease. In some embodiments, the treating step is to a patient that already has symptoms of a coronavirus infection. In some embodiments, the treating step is prophylactic. In some embodiments, the coronavirus infection is a SARS-CoV, MERS-CoV, or SARS-CoV-2 infection. In some embodiments, the antibody is administered for 10-18 months. In some embodiments, the antibody is administered intravenously. In some embodiments, the antibody is administered subcutaneously.

[0327] In some embodiments are disclosed methods for treating a coronavirus infection. In some embodiments, the methods comprise administering a pharmaceutical antibody formulation to a subject in need of treatment for a coronavirus infection, wherein the pharmaceutical antibody formulation comprises a therapeutically effective amount of an antibody, wherein the antibody comprises a V_{H}-CDR1 having the sequence of SEQ ID NO: 31, a V_{H}-CDR2 having the sequence of SEQ ID NO: 72, a V_{H}-CDR3 having the sequence of SEQ ID NO: 113, a V_{L}-CDR1 having the sequence of SEQ ID NO: 171, a V_{L}-CDR2 having the sequence of SEQ ID NO: 222; and a V_{L}-CDR3 having the sequence of SEQ ID NO: 249; histidine; methionine; NaCl; and polysorbate, wherein the formulation is at a pH between 5.3 and 6.3.

[0328] In some embodiments are disclosed methods for decreasing or inhibiting inflammation in a subject in need thereof. In some embodiments, the methods comprise administering a pharmaceutical antibody formulation to the subject in need thereof, wherein the pharmaceutical antibody formulation comprises a therapeutically effective amount of an antibody, wherein the antibody comprises a V_{H}-CDR1 having the sequence of SEQ ID NO: 31, a V_{H}-CDR2 having the sequence of SEQ ID NO: 72, a V_{H}-CDR3 having the sequence of SEQ ID NO: 113, a V_{L}-CDR1 having the sequence of SEQ ID NO: 171, a V_{L}-CDR2 having the sequence of SEQ ID NO: 222; and a V_{L}-CDR3 having the sequence of SEQ ID NO: 249; histidine; methionine; NaCl; and polysorbate, wherein the formulation is at a pH between 5.3 and 6.3.

### Polynucleotides and Vectors for Antibody Production

[0329] In some embodiments, the present disclosure provides isolated nucleic acids encoding any of the anti-Gal3 antibodies or binding fragments thereof disclosed herein. In another embodiment, the present disclosure provides vectors comprising a nucleic acid sequence encoding any anti-Gal3 antibody or binding fragment thereof disclosed herein. In some embodiments, this disclosure provides isolated nucleic acids that encode a light-chain CDR and a heavy-chain CDR of an anti-Gal3 antibody or binding fragment thereof disclosed herein.

[0330] In some embodiments, nucleic acid sequences encoding for heavy chain variable regions are depicted in FIG. 29 (SEQ ID NOs: 539-620, 834). In some embodiments, nucleic acid sequences encoding for light chain variable regions are depicted in FIG. 30 (SEQ ID NOs: 621-702, 835). In some embodiments, nucleic acid sequences encoding for heavy chains are depicted in FIG. 31 (SEQ ID NO: 703-749, 836). In some embodiments, nucleic acid sequences encoding for light chains are depicted in FIG. 32 (SEQ ID NO: 750-796, 837).

[0331] The subject anti-Gal3 antibodies or binding fragments thereof can be prepared by recombinant DNA technology, synthetic chemistry techniques, or a combination thereof. For instance, sequences encoding the desired components of the anti-Gal3 antibodies, including light chain CDRs and heavy chain CDRs are typically assembled cloned into an expression vector using standard molecular techniques know in the art. These sequences may be assembled from other vectors encoding the desired protein sequence, from PCR-generated fragments using respective template nucleic acids, or by assembly of synthetic oligonucleotides encoding the desired sequences. Expression systems can be created by transfecting a suitable cell with an expressing vector which comprises an anti-Gal3 antibody of interest or binding fragment thereof.

[0332] Nucleotide sequences corresponding to various regions of light or heavy chains of an existing antibody can be readily obtained and sequenced using convention techniques including but not limited to hybridization, PCR, and DNA sequencing. Hybridoma cells that produce monoclonal antibodies serve as a preferred source of antibody nucleotide sequences. A vast number of hybridoma cells producing an array of monoclonal antibodies may be obtained from public or private repositories. The largest depository agent is American Type Culture Collection, which offers a diverse collection of well-characterized hybridoma cell lines. Alternatively, antibody nucleotides can be obtained from immunized or non-immunized rodents or humans, and form organs such as spleen and peripheral blood lymphocytes. Specific techniques applicable for extracting and synthesizing antibody nucleotides are described in Orlandi et al. (1989) Proc. Natl. Acad. Sci. U.S.A. 86: 3833-3837; Larrick et al. (1989) Biochem. Biophys. Res. Commun. 160:1250-1255; Sastry et al. (1989) Proc. Natl. Acad. Sci., U.S.A. 86: 5728-5732; and U.S. Pat. No. 5,969,108.

[0333] Polynucleotides encoding anti-Gal3 antibodies or binding fragments thereof can also be modified, for example, by substituting the coding sequence for human heavy and light chain constant regions in place of the homologous non-human sequences. In that manner, chimeric antibodies are prepared that retain the binding specificity of the original anti-Gal3 antibody or binding fragment thereof.

### Anti-Gal3 Antibody Production

[0334] In some embodiments, anti-Gal3 antibodies or binding fragments thereof are raised by standard protocol by injecting a production animal with an antigenic composition. See, e.g., Harlow and Lane, Antibodies: A Laboratory Manual, Cold Spring Harbor Laboratory, 1988. When utilizing an entire protein, or a larger section of the protein, antibodies may be raised by immunizing the production animal with the protein and a suitable adjuvant (e.g., Freund's, Freund's complete, oil-in-water emulsions, etc.). When a smaller peptide is utilized, it is advantageous to conjugate the peptide with a larger molecule to make an immunostimulatory conjugate. Commonly utilized conjugate proteins that are commercially available for such use include bovine serum albumin (BSA) and keyhole limpet hemocyanin (KLH). In order to raise antibodies to particular epitopes, peptides derived from the full sequence may be utilized. Alternatively, in order to generate antibodies to relatively short peptide portions of the protein target, a superior immune response may be elicited if the polypeptide is joined to a carrier protein, such as ovalbumin, BSA or KLH.

[0335] Polyclonal or monoclonal anti-Gal3 antibodies or binding fragments thereof can be produced from animals which have been genetically altered to produce human immunoglobulins. A transgenic animal can be produced by initially producing a “knock-out” animal which does not produce the animal's natural antibodies, and stably transforming the animal with a human antibody locus (e.g., by the use of a human artificial chromosome). In such cases, only human antibodies are then made by the animal. Techniques for generating such animals, and deriving antibodies therefrom, are described in U.S. Pat. Nos. 6,162,963 and 6,150,584, each incorporated fully herein by reference in its entirety. Such antibodies can be referred to as human xenogenic antibodies.

[0336] Alternatively, anti-Gal3 antibodies or binding fragments thereof can be produced from phage libraries containing human variable regions. See U.S. Pat. No. 6,174,708, incorporated fully herein by reference in its entirety.

[0337] In some aspects of any of the embodiments disclosed herein, an anti-Gal3 antibody or binding fragment thereof is produced by a hybridoma.

[0338] For monoclonal anti-Gal3 antibodies, hybridomas may be formed by isolating the stimulated immune cells, such as those from the spleen of the inoculated animal. These cells can then be fused to immortalized cells, such as myeloma cells or transformed cells, which are capable of replicating indefinitely in cell culture, thereby producing an immortal, immunoglobulin-secreting cell line. The immortal cell line utilized can be selected to be deficient in enzymes necessary for the utilization of certain nutrients. Many such cell lines (such as myelomas) are known to those skilled in the art, and include, for example: thymidine kinase (TK) or hypoxanthine-guanine phosphoriboxyl transferase (HGPRT). These deficiencies allow selection for fused cells according to their ability to grow on, for example, hypoxanthine aminopterinthymidine medium (HAT).

[0339] In addition, the anti-Gal3 antibody or binding fragment thereof may be produced by genetic engineering.

[0340] Anti-Gal3 antibodies or binding fragments thereof disclosed herein can have a reduced propensity to induce an undesired immune response in humans, for example, anaphylactic shock, and can also exhibit a reduced propensity for priming an immune response which would prevent repeated dosage with an antibody therapeutic or imaging agent (e.g., the human-anti-murine-antibody “HAMA” response). Such anti-Gal3 antibodies or binding fragments thereof include, but are not limited to, humanized, chimeric, or xenogenic human anti-Gal3 antibodies or binding fragments thereof.

[0341] Chimeric anti-Gal3 antibodies or binding fragments thereof can be made, for example, by recombinant means by combining the murine variable light and heavy chain regions (VK and VH), obtained from a murine (or other animal-derived) hybridoma clone, with the human constant light and heavy chain regions, in order to produce an antibody with predominantly human domains. The production of such chimeric antibodies is well known in the art and may be achieved by standard means (as described, e.g., in U.S. Pat. No. 5,624,659, incorporated fully herein by reference).

[0342] The term “humanized” as applies to a non-human (e.g. rodent or primate) antibodies are hybrid immunoglobulins, immunoglobulin chains or fragments thereof which contain minimal sequence derived from non-human immunoglobulin. For the most part, humanized antibodies are human immunoglobulins (recipient antibody) in which residues from a complementary determining region (CDR) of the recipient are replaced by residues from a CDR of a non-human species (donor antibody) such as mouse, rat, rabbit or primate having the desired specificity, affinity and capacity. In some embodiments, Fv framework region (FR) residues of the human immunoglobulin are replaced by corresponding non-human residues. Furthermore, the humanized antibody may comprise residues which are found neither in the recipient antibody nor in the imported CDR or framework sequences. These modifications are made to further refine and optimize antibody performance and minimize immunogenicity when introduced into a human body. In some examples, the humanized antibody will comprise substantially all of at least one, and typically two, variable domains, in which all or substantially all of the CDR regions correspond to those of a non-human immunoglobulin and all or substantially all of the FR regions are those of a human immunoglobulin sequence. The humanized antibody may also comprise at least a portion of an immunoglobulin constant region (Fc), typically that of a human immunoglobulin.

[0343] Humanized antibodies can be engineered to contain human-like immunoglobulin domains and incorporate only the complementarity-determining regions of the animal-derived antibody. This can be accomplished by carefully examining the sequence of the hyper-variable loops of the variable regions of a monoclonal antigen binding unit or monoclonal antibody and fitting them to the structure of a human antigen binding unit or human antibody chains. See, e.g., U.S. Pat. No. 6,187,287, incorporated fully herein by reference.

[0344] Methods for humanizing non-human antibodies are well known in the art. “Humanized” antibodies are antibodies in which at least part of the sequence has been altered from its initial form to render it more like human immunoglobulins. In some versions, the heavy (H) chain and light (L) chain constant (C) regions are replaced with human sequence. This can be a fusion polypeptide comprising a variable (V) region and a heterologous immunoglobulin C region. In some versions, the complementarity determining regions (CDRs) comprise non-human antibody sequences, while the V framework regions have also been converted to human sequences. See, for example, EP 0329400. In some versions, V regions are humanized by designing consensus sequences of human and mouse V regions and converting residues outside the CDRs that are different between the consensus sequences.

[0345] In principle, a framework sequence from a humanized antibody can serve as the template for CDR grafting; however, it has been demonstrated that straight CDR replacement into such a framework can lead to significant loss of binding affinity to the antigen. Glaser et al. (1992) J. Immunol. 149:2606; Tempest et al. (1992) Biotechnology 9:266; and Shalaby et al. (1992) J. Exp. Med. 17:217. The more homologous a human antibody (HuAb) is to the original murine antibody (muAb), the less likely that the human framework will introduce distortions into the murine CDRs that could reduce affinity. Based on a sequence homology search against an antibody sequence database, the HuAb IC4 provides good framework homology to muM4TS0.22, although other highly homologous HuAbs would be suitable as well, especially kappa L chains from human subgroup I or H chains from human subgroup III. Kabat et al. (1987). Various computer programs such as ENCAD (Levitt et al. (1983) J. Mol. Biol. 168:595) are available to predict the ideal sequence for the V region. The disclosure thus encompasses HuAbs with different variable (V) regions. It is within the skill of one in the art to determine suitable V region sequences and to optimize these sequences. Methods for obtaining antibodies with reduced immunogenicity are also described in U.S. Pat. No. 5,270,202 and EP 699,755, each hereby incorporated by reference in its entirety.

[0346] Humanized antibodies can be prepared by a process of analysis of the parental sequences and various conceptual humanized products using three dimensional models of the parental and humanized sequences. Three dimensional immunoglobulin models are familiar to those skilled in the art. Computer programs are available which illustrate and display probable three-dimensional conformational structures of selected candidate immunoglobulin sequences. Inspection of these displays permits analysis of the likely role of the residues in the functioning of the candidate immunoglobulin sequence, i.e., the analysis of residues that influence the ability of the candidate immunoglobulin to bind its antigen. In this way, FR residues can be selected and combined from the consensus and import sequence so that the desired antibody characteristic, such as increased affinity for the target antigen(s), is achieved.

[0347] A process for humanization of subject antigen binding units can be as follows. The best-fit germline acceptor heavy and light chain variable regions are selected based on homology, canonical structure and physical properties of the human antibody germlines for grafting. Computer modeling of mVH/VL versus grafted hVH/VL is performed and prototype humanized antibody sequence is generated. If modeling indicated a need for framework back-mutations, second variant with indicated FW changes is generated. DNA fragments encoding the selected germline frameworks and murine CDRs are synthesized. The synthesized DNA fragments are subcloned into IgG expression vectors and sequences are confirmed by DNA sequencing. The humanized antibodies are expressed in cells, such as 293F and the proteins are tested, for example in MDM phagocytosis assays and antigen binding assays. The humanized antigen binding units are compared with parental antigen binding units in antigen binding affinity, for example, by FACS on cells expressing the target antigen. If the affinity is greater than 2-fold lower than parental antigen binding unit, a second round of humanized variants can be generated and tested as described above.

[0348] As noted above, an anti-Gal3 antibody or binding fragment thereof can be either “monovalent” or “multivalent.” Whereas the former has one binding site per antigen-binding unit, the latter contains multiple binding sites capable of binding to more than one antigen of the same or different kind. Depending on the number of binding sites, antigen binding units may be bivalent (having two antigen-binding sites), trivalent (having three antigen-binding sites), tetravalent (having four antigen-binding sites), and so on.

[0349] Multivalent anti-Gal3 antibodies or binding fragments thereof can be further classified on the basis of their binding specificities. A “monospecific” anti-Gal3 antibody or binding fragment thereof is a molecule capable of binding to one or more antigens of the same kind. A “multispecific” anti-Gal3 antibody or binding fragment thereof is a molecule having binding specificities for at least two different antigens. While such molecules normally will only bind two distinct antigens (i.e. bispecific anti-Gal3 antibodies), antibodies with additional specificities such as trispecific antibodies are encompassed by this expression when used herein. This disclosure further provides multispecific anti-Gal3 antibodies. Multispecific anti-Gal3 antibodies or binding fragments thereof are multivalent molecules capable of binding to at least two distinct antigens, e.g., bispecific and trispecific molecules exhibiting binding specificities to two and three distinct antigens, respectively.

[0350] In some embodiments, the methods further provide for screening for or identifying antibodies capable of disrupting an interaction between Gal3 and a viral protein, such as a protein of the SARS-CoV-2 virus or other coronaviruses. In some embodiments, the viral protein is a SARS-CoV-2 S, E, M, or HE protein. In some embodiments, the method may comprise: (a) contacting Gal3 protein with an antibody that selectively binds to Gal3, thereby forming a Gal3-antibody complex; (b) contacting the Gal3-antibody complex with the viral protein; (c) removing unbound viral protein; and (d) detecting viral protein bound to the Gal3-antibody complex, wherein the antibody is capable of disrupting an interaction of Gal3 and the viral protein when the viral protein is not detected in (d). In some embodiments, the method comprises an immunoassay. In some embodiments, the immunoassay is an enzyme-linked immunosorbent assay (ELISA).

[0351] In some embodiments, the methods further provide for screening for or identifying antibodies capable of disrupting an interaction between Gal3 and a host receptor protein that a virus uses to enter the host cell. In some embodiments, the virus is a SARS-CoV-2 virus or other coronavirus. In some embodiments, the host receptor protein is ACE2 or CD147. In some embodiments, the method may comprise: (a) contacting Gal3 protein with an antibody that selectively binds to Gal3, thereby forming a Gal3-antibody complex; (b) contacting the Gal3-antibody complex with the host receptor protein; (c) removing unbound host receptor protein; and (d) detecting host receptor protein bound to the Gal3-antibody complex, wherein the antibody is capable of disrupting an interaction of Gal3 and the host receptor protein when the host receptor protein is not detected in (d). In some embodiments, the method comprises an immunoassay. In some embodiments, the immunoassay is an enzyme-linked immunosorbent assay (ELISA).

[0352] In some embodiments, the methods further provide for treating a disease or disorder in a subject in need thereof. In some embodiments, the disease or disorder is a viral infection. In some embodiments, the disease or disorder is a coronavirus infection. In some embodiments, the disease or disorder is a SARS-CoV-2 infection. In some embodiments, the disease or disorder is a sequela of a previous viral infection. In some embodiments, the methods may comprise: administering to the subject an anti-Gal3 antibody or binding fragment thereof, wherein the anti-Gal3 antibody or binding fragment thereof disrupts an interaction between Gal3 and a viral protein and/or a host receptor protein, thereby treating the infection. In some embodiments, the anti-Gal3 antibody or binding fragment thereof is specific for the N-terminal domain of Gal3, N-terminus of Gal3, or the TRD of Gal3. In some embodiments, the viral protein is a SARS-CoV-2 S, E, M, or HE protein. In some embodiments, the host receptor protein is ACE2 or CD147. In some embodiments, the anti-Gal3 antibody or binding fragment thereof is selected from the group consisting of: 6H6.2D6, 20H5.A3, 20D11.2C6, 4G2.2G6, 13H12.2F8, 19B5.2E6, 15G7.2A7, 23H9.2E4, 19D9.2E5, 2D10.2B2, 2D10-VH0-VL0, 4A11.2B5, 14H10.2C9, 3B11.2G2, 13A12.2E5, 7D8.2D8, 15F10.2D6, 23B10.2B12, 12G5.D7, 24D12.2H9, 6B3.2D3, 13G4.2F8, 9H2.2H10, IMT-001, IMT006, IMT006b, and IMT006c, or binding fragment thereof. In some embodiments, the sequelae include but are not limited to fibrosis, pulmonary fibrosis, pulmonary edema, cardiovascular disease, thrombosis, neurological disease, kidney disease, or liver disease. In some embodiments, the anti-Gal3 antibody or binding fragment thereof is administered in conjunction with another antiviral or anti-inflammatory therapy. Potential antiviral or anti-inflammatory therapeutics may include but are not limited to chloroquine, hydroxychloroquine, favipiravir, favilavir, remdesivir, tocilizumab, baricitinib, acalabrutinib, galidesivir, sarilumab, lopinavir, ritonavir, darunavir, ribavirin, dexamethasone, ciclesonide, convalescent plasma, interferon-α, pegylated interferon-α, or interferon alfa-2b, or any combination thereof.

### Payload

[0353] In some embodiments, any anti-Gal3 antibody disclosed herein further comprises a payload. In some embodiments, the payload comprises a small molecule, a protein or functional fragment thereof, a peptide, or a nucleic acid polymer.

[0354] In some embodiments, the number of payloads conjugated to the anti-Gal3 antibody (e.g., the drug-to-antibody ratio or DAR) is about 1:1, one payload to one anti-Gal3 antibody. In some embodiments, the ratio of the payloads to the anti-Gal3 antibody is about 2:1, 3:1, 4:1, 5:1, 6:1, 7:1, 8:1, 9:1, 10:1, 11:1, 12:1, 13:1, 14:1, 15:1, 16:1, 17:1, 18:1, 19:1, or 20:1. In some embodiments, the ratio of the payloads to the anti-Gal3 antibody is about 2:1. In some embodiments, the ratio of the payloads to the anti-Gal3 antibody is about 3:1. In some embodiments, the ratio of the payloads to the anti-Gal3 antibody is about 4:1. In some embodiments, the ratio of the payloads to the anti-Gal3 antibody is about 6:1. In some embodiments, the ratio of the payloads to the anti-Gal3 antibody is about 8:1. In some embodiments, the ratio of the payloads to the anti-Gal3 antibody is about 12:1.

[0355] In some embodiment, the payload is a small molecule. In some embodiments, the small molecule is a cytotoxic payload. Exemplary cytotoxic payloads include, but are not limited to, microtubule disrupting agents, DNA modifying agents, or Akt inhibitors.

[0356] In some embodiments, the payload comprises a microtubule disrupting agent. Exemplary microtubule disrupting agents include, but are not limited to, 2-methoxyestradiol, auristatin, chalcones, colchicine, combretastatin, cryptophycin, dictyostatin, discodermolide, dolastain, eleutherobin, epothilone, halichondrin, laulimalide, maytansine, noscapinoid, paclitaxel, peloruside, phomopsin, podophyllotoxin, rhizoxin, spongistatin, taxane, tubulysin, vinca alkaloid, vinorelbine, or derivatives or analogs thereof.

[0357] In some embodiments, the maytansine is a maytansinoid. In some embodiments, the maytansinoid is DM1, DM4, or ansamitocin. In some embodiments, the maytansinoid is DM1. In some embodiments, the maytansinoid is DM4. In some embodiments, the maytansinoid is ansamitocin. In some embodiments, the maytansinoid is a maytansionid derivative or analog such as described in U.S. Pat. Nos. 5,208,020, 5,416,064, 7,276,497, and 6,716,821 or U.S. Publication Nos. 2013029900 and US20130323268.

[0358] In some embodiments, the payload is a dolastatin, or a derivative or analog thereof. In some embodiments, the dolastatin is dolastatin 10 or dolastatin 15, or derivatives or analogs thereof. In some embodiments, the dolastatin 10 analog is auristatin, soblidotin, symplostatin 1, or symplostatin 3. In some embodiments, the dolastatin 15 analog is cemadotin or tasidotin.

[0359] In some embodiments, the dolastatin 10 analog is auristatin or an auristatin derivative. In some embodiments, the auristatin or auristatin derivative is auristatin E (AE), auristatin F (AF), auristatin E5-benzoylvaleric acid ester (AEVB), monomethyl auristatin E (MMAE), monomethyl auristatin F (MMAF), or monomethyl auristatin D (MMAD), auristatin PE, or auristatin PYE. In some embodiments, the auristatin derivative is monomethyl auristatin E (MMAE). In some embodiments, the auristatin derivative is monomethyl auristatin F (MMAF). In some embodiments, the auristatin is an auristatin derivative or analog such as described in U.S. Pat. Nos. 6,884,869, 7,659,241, 7,498,298, 7,964,566, 7,750,116, 8,288,352, 8,703,714, and 8,871,720.

[0360] In some embodiments, the payload comprises a DNA modifying agent. In some embodiments, the DNA modifying agent comprises DNA cleavers, DNA intercalators, DNA transcription inhibitors, or DNA cross-linkers. In some embodiments, the DNA cleaver comprises bleomycin A2, calicheamicin, or derivatives or analogs thereof. In some embodiments, the DNA intercalator comprises doxorubicin, epirubicin, PNU-159682, duocarmycin, pyrrolobenzodiazepine, oligomycin C, daunorubicin, valrubicin, topotecan, or derivatives or analogs thereof. In some embodiments, the DNA transcription inhibitor comprises dactinomycin. In some embodiments, the DNA cross-linker comprises mitomycin C.

[0361] In some embodiments, the DNA modifying agent comprises amsacrine, anthracycline, camptothecin, doxorubicin, duocarmycin, enediyne, etoposide, indolinobenzodiazepine, netropsin, teniposide, or derivatives or analogs thereof.

[0362] In some embodiments, the anthracycline is doxorubicin, daunorubicin, epirubicin, idarubicin, mitomycin-C, dactinomycin, mithramycin, nemorubicin, pixantrone, sabarubicin, or valrubicin.

[0363] In some embodiments, the analog of camptothecin is topotecan, irinotecan, silatecan, cositecan, exatecan, lurtotecan, gimatecan, belotecan, rubitecan, or SN-38.

[0364] In some embodiments, the duocarmycin is duocarmycin A, duocarmycin B1, duocarmycin B2, duocarmycin C1, duocarmycin C2, duocarmycin D, duocarmycin SA, or CC-1065. In some embodiments, the enediyne is a calicheamicin, esperamicin, or dynemicin A.

[0365] In some embodiments, the pyrrolobenzodiazepine is anthramycin, abbeymycin, chicamycin, DC-81, mazethramycin, neothramycins A, neothramycin B, porothramycin, prothracarcin, sibanomicin (DC-102), sibiromycin, or tomaymycin. In some embodiments, the pyrrolobenzodiazepine is a tomaymycin derivative, such as described in U.S. Pat. Nos. 8,404,678 and 8,163,736. In some embodiments, the pyrrolobenzodiazepine is such as described in U.S. Pat. Nos. 8,426,402, 8,802,667, 8,809,320, 6,562,806, 6,608,192, 7,704,924, 7,067,511, 7,612,062, 7,244,724, 7,528,126, 7,049,311, 8,633,185, 8,501,934, and 8,697,688 and U.S. Publication No. US20140294868.

[0366] In some embodiments, the pyrrolobenzodiazepine is a pyrrolobenzodiazepine dimer. In some embodiments, the PBD dimer is a symmetric dimer. Examples of symmetric PBD dimers include, but are not limited to, SJG-136 (SG-2000), ZC-423 (SG2285), SJG-720, SJG-738, ZC-207 (SG2202), and DSB-120. In some embodiments, the PBD dimer is an unsymmetrical dimer. Examples of unsymmetrical PBD dimers include, but are not limited to, SJG-136 derivatives such as described in U.S. Pat. Nos. 8,697,688 and 9,242,013 and U.S. Publication No. 20140286970.

[0367] In some embodiments, the payload comprises an Akt inhibitor. In some embodiments, the Akt inhibitor comprises ipatasertib (GDC-0068) or derivatives thereof.

[0368] In some embodiments, the payload comprises a polymerase inhibitor, including, but not limited to polymerase II inhibitors such as a-amanitin, and poly(ADP-ribose) polymerase (PARP) inhibitors. Exemplary PARP inhibitors include, but are not limited to Iniparib (BSI 201), Talazoparib (BMN-673), Olaparib (AZD-2281), Olaparib, Rucaparib (AG014699, PF-01367338), Veliparib (ABT-888), CEP 9722, MK 4827, BGB-290, or 3-aminobenzamide.

[0369] In some embodiments, the payload comprises a detectable moiety. As used herein, a “detectable moiety” may comprise an atom, molecule, or compound that is useful in diagnosing, detecting or visualizing a location and/or quantity of a target molecule, cell, tissue, organ, and the like. Detectable moieties that can be used in accordance with the embodiments herein include, but are not limited to, radioactive substances (e.g. radioisotopes, radionuclides, radiolabels or radiotracers), dyes, contrast agents, fluorescent compounds or molecules, bioluminescent compounds or molecules, enzyme and enhancing agents (e.g. paramagnetic ions), or specific binding moieties such as streptavidin, avidin, or biotin. In addition, some nanoparticles, for example quantum dots or metal nanoparticles can be suitable for use as a detectable moiety.

[0370] Exemplary radioactive substances that can be used as detectable moieties in accordance with the embodiments herein include, but are not limited to, ¹⁸F, ¹⁸F-FAC, ³²P, ³³P, ⁴⁵Ti, ⁴⁷Sc, ⁵²Fe, ⁵⁹Fe, ⁶²Cu, ⁶⁴Cu, ⁶⁷Cu, ⁶⁷Ga, ⁶⁸Ga, ⁷⁵Sc, ⁷⁷As, ⁸⁶Y, ⁹⁰Y, ⁸⁹Sr, ⁸⁹Zr, ⁹⁴Tc, ⁹⁴Tc, ⁹⁹mTC, ⁹⁹Mo, ¹⁰⁵Pd, ¹⁰⁵Rb, ¹¹¹Ag, ¹¹¹In, ¹²³I, ¹²⁴I, ¹²⁵I, ¹³¹I, ¹⁴²Pr, ¹⁴³Pr, ¹⁴⁹Pm, ¹⁵³Sm, ¹⁵⁴⁻¹⁵⁸Gd, ¹⁶¹Tb, ¹⁶⁶Dy, ¹⁶⁶Ho, ¹⁶⁹Er, ¹⁷⁵Lu, ¹⁷⁷Lu, ¹⁸⁶Re, ¹⁸⁸Re, ¹⁸⁹Re, ¹⁹⁴Ir, ¹⁹⁸Au, ¹⁹⁹Au, ²¹¹At, ²¹¹Pb, ²¹²Bi, ²¹²Pb, ²¹³Bi, ²²³Ra and ²²⁵Ac. Exemplary paramagnetic ions substances that can be used as detectable markers include, but are not limited to ions of transition and lanthanide metals (e.g. metals having atomic numbers of 6 to 9, 21-29, 42, 43, 44, or 57-71). These metals include ions of Cr, V, Mn, Fe, Co, Ni, Cu, La, Ce, Pr, Nd, Pm, Sm, Eu, Gd, Tb, Dy, Ho, Er, Tm, Yb and Lu.

[0371] When the detectable marker is a radioactive metal or paramagnetic ion, in some embodiments, the marker can be reacted with a reagent having a long tail with one or more chelating groups attached to the long tail for binding these ions. The long tail can be a polymer such as a polylysine, polysaccharide, or other derivatized or derivatizable chain having pendant groups to which may be bound to a chelating group for binding the ions. Examples of chelating groups that may be used according to the embodiments herein include, but are not limited to, ethylenediaminetetraacetic acid (EDTA), diethylenetriaminepentaacetic acid (DTPA), DOTA, NOTA, NOGADA, NETA, deferoxamine (DfO), porphyrins, polyamines, crown ethers, bis-thiosemicarbazones, polyoximes, and like groups. The chelate can be linked to the antigen binding construct by a group which allows formation of a bond to the molecule with minimal loss of immunoreactivity and minimal aggregation and/or internal cross-linking. The same chelates, when complexed with non-radioactive metals, such as manganese, iron and gadolinium are useful for MRI, when used along with the antigen binding constructs and carriers described herein. Macrocyclic chelates such as NOTA, NOGADA, DOTA, and TETA are of use with a variety of metals and radiometals including, but not limited to, radionuclides of gallium, yttrium and copper, respectively. Other ring-type chelates such as macrocyclic polyethers, which are of interest for stably binding radionuclides, such as Radium-223 for RAIT may be used. In certain embodiments, chelating moieties may be used to attach a PET imaging agent, such as an Aluminum-18F complex, to a targeting molecule for use in PET analysis.

[0372] Exemplary contrast agents that can be used as detectable moieties in accordance with the embodiments of the disclosure include, but are not limited to, barium, diatrizoate, ethiodized oil, gallium citrate, iocarmic acid, iocetamic acid, iodamide, iodipamide, iodoxamic acid, iogulamide, iohexyl, iopamidol, iopanoic acid, ioprocemic acid, iosefamic acid, ioseric acid, iosulamide meglumine, iosemetic acid, iotasul, iotetric acid, iothalamic acid, iotroxic acid, ioxaglic acid, ioxotrizoic acid, ipodate, meglumine, metrizamide, metrizoate, propyliodone, thallous chloride, or combinations thereof.

[0373] Bioluminescent and fluorescent compounds or molecules and dyes that can be used as detectable moieties in accordance with the embodiments of the disclosure include, but are not limited to, allophycocyanin (APC), phycoerythrin (PE), fluorescein, fluorescein isothiocyanate (FITC), OREGON GREEN™, rhodamine, Texas red, tetrarhodimine isothiocynate (TRITC), Cy3, Cy5, and the like), fluorescent markers (e.g., green fluorescent protein (GFP) and the like), autoquenched fluorescent compounds that are activated by tumor-associated proteases, enzymes (e.g., luciferase, horseradish peroxidase, alkaline phosphatase, and the like), nanoparticles, biotin, digoxigenin or combinations thereof.

[0374] Enzymes that can be used as detectable moieties in accordance with the embodiments of the disclosure include, but are not limited to, horseradish peroxidase, alkaline phosphatase, acid phosphatase, glucose oxidase, β-galactosidase, β-glucoronidase or β-lactamase. Such enzymes may be used in combination with a chromogen, a fluorogenic compound or a luminogenic compound to generate a detectable signal.

[0375] In some embodiments, the payload is a nanoparticle. The term “nanoparticle” refers to a microscopic particle whose size is measured in nanometers, e.g., a particle with at least one dimension less than about 100 nm. Nanoparticles can be used as detectable substances because they are small enough to scatter visible light rather than absorb it. For example, gold nanoparticles possess significant visible light extinction properties and appear deep red to black in solution. As a result, compositions comprising antigen binding constructs conjugated to nanoparticles can be used for the in vivo imaging of T-cells in a subject. At the small end of the size range, nanoparticles are often referred to as clusters. Metal, dielectric, and semiconductor nanoparticles have been formed, as well as hybrid structures (e.g. core-shell nanoparticles). Nanospheres, nanorods, and nanocups are just a few of the shapes that have been grown. Semiconductor quantum dots and nanocrystals are examples of additional types of nanoparticles. Such nanoscale particles can be used as payloads to be conjugated to any one of the anti-Gal3 antibodies disclosed herein.

[0376] In some embodiments, the payload is an antimicrobial agent, a therapeutic agent, a prodrug, a peptide, a protein, an enzyme, a lipid, a biological response modifier, a pharmaceutical agent, a lymphokine, a heterologous antibody or fragment thereof, a detectable label, a polyethylene glycol (PEG) molecule, or a combination of two or more of the agents. In some embodiments, the payload comprises a neuroactive polypeptide, for example, a neurotrophic factors, endocrine factors, growth factors, paracrine factors, hypothalamic release factors, neurotransmitter polypeptides, polypeptide agonists for a receptor expressed by a CNS cell, polypeptides involved in lysosomal storage disease or any combination thereof. In some embodiments, the payload comprises an IL-1 receptor antagonist (IL-IRa), dalargin, an interferon-(3, Glial-derived neurotrophic factor (GDNF), tumor necrosis factor receptor (TNFR), nerve growth factor (NGF), brain derived neurotrophic factor (BDNF), neurotrophin-4/5, neurotrophin (NT)-3, a neurturin, neuregulin, a netrin, ciliary neurotrophic factor (CNTF), stem cell factor (SCF), a semaphorin, hepatocyte growth factor (HGF), epidermal growth factor (EGF), transforming growth factor (TGF)-cx, TGF-B, vascular endothelial growth factor (VEGF), platelet-derived growth factor (PDGF), heregulin, artemin, persephin, interleukins, granulocyte-colony stimulating factor (CSF), granulocyte-macrophage-CSF, cardiotrophin-1, hedgehogs, leukemia inhibitory factor (LIF), midkine, pleiotrophin, erythropoietin (EPO), bone morphogenetic proteins (BMPs), netrins, saposins, any fragment thereof, or any combination thereof. In some embodiments, the payload is another antibody, or a heavy and/or light chain, or any other fragment thereof.

[0377] In some embodiments, the payload comprises a heterologous antibody or fragment thereof, for example, a heterologous antibody or fragment thereof specifically binds to one or more of beta-secretase 1 (BACE1), CD20, CD25, CD52, CD33, CTLA-4, tenascin, alpha-4 (a4) integrin, IL-12, IL-23, the p40 subunit of IL-12/IL-23, amyloid-13 (AI3), Huntingtin, nerve growth factor (NGF), epidermal growth factor receptor (EGFR/HER1), human epidermal growth factor receptor 2 (HER2/neu), vascular endothelial growth factor (VEGF), TrkA, TNF-a, TNF-13, a-synuclein Tau, apolipoprotein E4 (ApoE4), prion protein (PrP), leucine rich repeat kinase 2 (LRRK2), parkin, presenilin 1, presenilin 2, gamma secretase, death receptor 6 (DR6), amyloid precursor protein (APP), p75 neurotrophin receptor (p75NTR), caspase 6, a neurotrophic factor and/or a neurotrophic factor receptor.

[0378] In some embodiments, the payload comprises an immunomodulatory agent. Useful immunomodulatory agents include anti-hormones that block hormone action on tumors and immunosuppressive agents that suppress cytokine production, down-regulate self-antigen expression, or mask MHC antigens. Representative anti-hormones include anti-estrogens including, for example, tamoxifen, raloxifene, aromatase inhibiting 4(5)-imidazoles, 4-hydroxytamoxifen, trioxifene, keoxifene, LY 117018, onapristone, and toremifene; and anti-androgens such as flutamide, nilutamide, bicalutamide, leuprolide, and goserelin; and anti-adrenal agents. Illustrative immunosuppressive agents include, but are not limited to 2-amino-6-aryl-5-substituted pyrimidines, azathioprine, cyclophosphamide, bromocryptine, danazol, dapsone, glutaraldehyde, anti-idiotypic antibodies for MHC antigens and MHC fragments, cyclosporin A, steroids such as glucocorticosteroids, streptokinase, or rapamycin.

[0379] In some embodiments, the payload comprises an immune modulator. Exemplary immune modulators include, but are not limited to, gancyclovir, etanercept, tacrolimus, sirolimus, voclosporin, cyclosporine, rapamycin, cyclophosphamide, azathioprine, mycophenolate mofetil, methotrexate, glucocorticoid and its analogs, xanthines, stem cell growth factors, lymphotoxins, hematopoietic factors, tumor necrosis factor (TNF) (e.g., TNFα), interleukins (e.g., interleukin-1 (IL-1), IL-2, IL-3, IL-6, IL-10, IL-12, IL-18, and IL-21), colony stimulating factors (e.g., granulocyte-colony stimulating factor (G-CSF) and granulocyte macrophage-colony stimulating factor (GM-CSF)), interferons (e.g., interferons-alpha, interferon-beta, interferon-gamma), the stem cell growth factor designated “S1 factor,” erythropoietin and thrombopoietin, or a combination thereof.

[0380] In some embodiments, the payload comprises an immunotoxin. Immunotoxins include, but are not limited to, ricin, radionuclides, pokeweed antiviral protein, Pseudomonas exotoxin A, diphtheria toxin, ricin A chain, fungal toxins such as restrictocin and phospholipase enzymes. See, generally, “Chimeric Toxins,” Olsnes and Pihl, Pharmac. Ther. 15:355-381 (1981); and “Monoclonal Antibodies for Cancer Detection and Therapy,” eds. Baldwin and Byers, pp. 159-179, 224-266, Academic Press (1985).

[0381] In some embodiments, the payload comprises a nucleic acid polymer. In such instances, the nucleic acid polymer comprises short interfering nucleic acid (siNA), short interfering RNA (siRNA), double-stranded RNA (dsRNA), micro-RNA (miRNA), short hairpin RNA (shRNA), an antisense oligonucleotide. In other instances, the nucleic acid polymer comprises an mRNA, encoding, e.g., a cytotoxic protein or peptide or an apoptotic triggering protein or peptide. Exemplary cytotoxic proteins or peptides include a bacterial cytotoxin such as an alpha-pore forming toxin (e.g., cytolysin A from E. coli), a beta-pore-forming toxin (e.g., α-Hemolysin, PVL-panton Valentine leukocidin, aerolysin, clostridial Epsilon-toxin, Clostridium perfringens enterotoxin), binary toxins (anthrax toxin, edema toxin, C. botulinum C2 toxin, C spirofome toxin, C. perfringens iota toxin, C. difficile cyto-lethal toxins (A and B)), prion, parasporin, a cholesterol-dependent cytolysins (e.g., pneumolysin), a small pore-forming toxin (e.g., Gramicidin A), a cyanotoxin (e.g., microcystins, nodularins), a hemotoxin, a neurotoxin (e.g., botulinum neurotoxin), a cytotoxin, cholera toxin, diphtheria toxin, Pseudomonas exotoxin A, tetanus toxin, or an immunotoxin (idarubicin, ricin A, CRM9, Pokeweed antiviral protein, DT). Exemplary apoptotic triggering proteins or peptides include apoptotic protease activating factor-1 (Apaf-1), cytochrome-c, caspase initiator proteins (CASP2, CASP8, CASP9, CASP10), apoptosis inducing factor (AIF), p53, p73, p63, Bcl-2, Bax, granzyme B, poly-ADP ribose polymerase (PARP), and P 21-activated kinase 2 (PAK2). In additional instances, the nucleic acid polymer comprises a nucleic acid decoy. In some embodiments, the nucleic acid decoy is a mimic of protein-binding nucleic acids such as RNA-based protein-binding mimics. Exemplary nucleic acid decoys include transactivating region (TAR) decoy and Rev response element (RRE) decoy.

[0382] In some embodiments, the payload is an aptamer. Aptamers are small oligonucleotide or peptide molecules that bind to specific target molecules. Exemplary nucleic acid aptamers include DNA aptamers, RNA aptamers, or XNA aptamers which are RNA and/or DNA aptamers comprising one or more unnatural nucleotides. Exemplary nucleic acid aptamers include ARC19499 (Archemix Corp.), REG1 (Regado Biosciences), and ARC1905 (Ophthotech).

[0383] Nucleic acids in accordance with the embodiments described herein optionally include naturally occurring nucleic acids, or one or more nucleotide analogs or have a structure that otherwise differs from that of a naturally occurring nucleic acid. For example, 2′-modifications include halo, alkoxy, and allyloxy groups. In some embodiments, the 2′-OH group is replaced by a group selected from H, OR, R, halo, SH, SR, NH₂, NHR, NR₂ or CN, wherein R is C₁-C₆ alkyl, alkenyl, or alkynyl, and halo is F, Cl, Br, or I. Examples of modified linkages include phosphorothioate and 5′-N-phosphoramidite linkages.

[0384] Nucleic acids having a variety of different nucleotide analogs, modified backbones, or non-naturally occurring internucleoside linkages are utilized in accordance with the embodiments described herein. In some embodiments, nucleic acids include natural nucleosides (i.e., adenosine, thymidine, guanosine, cytidine, uridine, deoxyadenosine, deoxythymidine, deoxyguanosine, and deoxycytidine) or modified nucleosides. Examples of modified nucleotides include base modified nucleoside (e.g., aracytidine, inosine, isoguanosine, nebularine, pseudouridine, 2,6-diaminopurine, 2-aminopurine, 2-thiothymidine, 3-deaza-5-azacytidine, 2′-deoxyuridine, 3-nitorpyrrole, 4-methylindole, 4-thiouridine, 4-thiothymidine, 2-aminoadenosine, 2-thiothymidine, 2-thiouridine, 5-bromocytidine, 5-iodouridine, inosine, 6-azauridine, 6-chloropurine, 7-deazaadenosine, 7-deazaguanosine, 8-azaadenosine, 8-azidoadenosine, benzimidazole, M1-methyladenosine, pyrrolo-pyrimidine, 2-amino-6-chloropurine, 3-methyl adenosine, 5-propynylcytidine, 5-propynyluridine, 5-bromouridine, 5-fluorouridine, 5-methylcytidine, 7-deazaadenosine, 7-deazaguanosine, 8-oxoadenosine, 8-oxoguanosine, O(6)-methylguanine, and 2-thiocytidine), chemically or biologically modified bases (e.g., methylated bases), modified sugars (e.g., 2′-fluororibose, 2′-aminoribose, 2′-azidoribose, 2′-O-methylribose, L-enantiomeric nucleosides arabinose, and hexose), modified phosphate groups (e.g., phosphorothioates and 5′-N-phosphoramidite linkages), and combinations thereof. Natural and modified nucleotide monomers for the chemical synthesis of nucleic acids are readily available. In some embodiments, nucleic acids comprising such modifications display enhanced properties relative to nucleic acids consisting only of naturally occurring nucleotides. In some embodiments, nucleic acid modifications described herein are utilized to reduce and/or prevent digestion by nucleases (e.g. exonucleases, endonucleases, etc.). For example, the structure of a nucleic acid may be stabilized by including nucleotide analogs at the 3′ end of one or both strands order to reduce digestion.

[0385] Different nucleotide modifications and/or backbone structures may exist at various positions in the nucleic acid. Such modifications include morpholinos, peptide nucleic acids (PNAs), methylphosphonate nucleotides, thiolphosphonate nucleotides, 2′-fluoro N3-P5′-phosphoramidites, 1′, 5′-anhydrohexitol nucleic acids (HNAs), or a combination thereof.

[0386] Any of the anti-Gal3 antibodies disclosed herein may be conjugated to one or more (e.g. 1, 2, 3, 4, 5, 6, 7, 8, 9, or 10, or more) payloads described herein.

### Conjugation Chemistry

[0387] In some embodiments, the payload is conjugated to an anti-Gal3 antibody described herein by a native ligation. In some embodiments, the conjugation is as described in: Dawson, et al. “Synthesis of proteins by native chemical ligation,” Science 1994, 266, 776-779; Dawson, et al. “Modulation of Reactivity in Native Chemical Ligation through the Use of Thiol Additives,” J. Am. Chem. Soc. 1997, 119, 4325-4329; Hackeng, et al. “Protein synthesis by native chemical ligation: Expanded scope by using straightforward methodology,” Proc. Natl. Acad. Sci. USA 1999, 96, 10068-10073; or Wu, et al. “Building complex glycopeptides: Development of a cysteine-free native chemical ligation protocol,” Angew. Chem. Int. Ed. 2006, 45, 4116-4125. In some embodiments, the conjugation is as described in U.S. Pat. No. 8,936,910.

[0388] In some embodiments, the payload is conjugated to an anti-Gal3 antibody described herein by a site-directed method utilizing a “traceless” coupling technology (Philochem). In some embodiments, the “traceless” coupling technology utilizes an N-terminal 1,2-aminothiol group on the binding moiety which is then conjugated with a polynucleic acid molecule containing an aldehyde group. (see Casi et al., “Site-specific traceless coupling of potent cytotoxic drugs to recombinant antibodies for pharmacodelivery,” JACS 134(13): 5887-5892 (2012))

[0389] In some embodiments, the payload is conjugated to an anti-Gal3 antibody described herein by a site-directed method utilizing an unnatural amino acid incorporated into the binding moiety. In some embodiments, the unnatural amino acid comprises p-acetylphenylalanine (pAcPhe). In some embodiments, the keto group of pAcPhe is selectively coupled to an alkoxy-amine derivatived conjugating moiety to form an oxime bond. (see Axup et al., “Synthesis of site-specific antibody-drug conjugates using unnatural amino acids,” PNAS 109(40): 16101-16106 (2012)).

[0390] In some embodiments, the payload is conjugated to an anti-Gal3 antibody described herein by a site-directed method utilizing an enzyme-catalyzed process. In some embodiments, the site-directed method utilizes SMARTag™ technology (Redwood). In some embodiments, the SMARTag™ technology comprises generation of a formylglycine (FGly) residue from cysteine by formylglycine-generating enzyme (FGE) through an oxidation process under the presence of an aldehyde tag and the subsequent conjugation of FGly to an alkylhydraine-functionalized polynucleic acid molecule via hydrazino-Pictet-Spengler (HIPS) ligation. (see Wu et al., “Site-specific chemical modification of recombinant proteins produced in mammalian cells by using the genetically encoded aldehyde tag,” PNAS 106(9): 3000-3005 (2009); Agarwal, et al., “A Pictet-Spengler ligation for protein chemical modification,” PNAS 110(1): 46-51 (2013)).

[0391] In some embodiments, the enzyme-catalyzed process comprises microbial transglutaminase (mTG). In some embodiments, the payload is conjugated to the anti-Gal3 antibody utilizing a microbial transglutaminase catalyzed process. In some embodiments, mTG catalyzes the formation of a covalent bond between the amide side chain of a glutamine within the recognition sequence and a primary amine of a functionalized polynucleic acid molecule. In some embodiments, mTG is produced from Streptomyces mobarensis. (see Strop et al., “Location matters: site of conjugation modulates stability and pharmacokinetics of antibody drug conjugates,” Chemistry and Biology 20(2) 161-167 (2013)).

[0392] In some embodiments, the payload is conjugated to an anti-Gal3 antibody by a method as described in PCT Publication No. WO2014/140317, which utilizes a sequence-specific transpeptidase and is hereby expressly incorporated by reference in its entirety.

[0393] In some embodiments, the payload is conjugated to an anti-Gal3 antibody described herein by a method as described in U.S. Patent Publication Nos. 2015/0105539 and 2015/0105540.

### Linker

[0394] In some embodiments, a linker described herein comprises a natural or synthetic polymer, consisting of long chains of branched or unbranched monomers, and/or cross-linked network of monomers in two or three dimensions. In some embodiments, the linker includes a polysaccharide, lignin, rubber, or polyalkylene oxide (e.g., polyethylene glycol).

[0395] In some embodiments, the linker includes, but is not limited to, alpha-, omega-dihydroxylpolyethyleneglycol, biodegradable lactone-based polymer, e.g. polyacrylic acid, polylactide acid (PLA), poly(glycolic acid) (PGA), polypropylene, polystyrene, polyolefin, polyamide, polycyanoacrylate, polyimide, polyethylenterephthalat (PET, PETG), polyethylene terephthalate (PETE), polytetramethylene glycol (PTG), or polyurethane as well as mixtures thereof. As used herein, a mixture refers to the use of different polymers within the same compound as well as in reference to block copolymers. In some embodiments, block copolymers are polymers wherein at least one section of a polymer is built up from monomers of another polymer. In some embodiments, the linker comprises polyalkylene oxide. In some embodiments, the linker comprises PEG. In some embodiments, the linker comprises polyethylene imide (PEI) or hydroxy ethyl starch (HES).

[0396] In some embodiments, the polyalkylene oxide (e.g., PEG) is a polydisperse or monodisperse compound. In some embodiments, polydisperse material comprises disperse distribution of different molecular weight of the material, characterized by mean weight (weight average) size and dispersity. In some embodiments, the monodisperse PEG comprises one size of molecules. In some embodiments, the linker is poly- or monodispersed polyalkylene oxide (e.g., PEG) and the indicated molecular weight represents an average of the molecular weight of the polyalkylene oxide, e.g., PEG, molecules.

[0397] In some embodiments, the linker comprises a polyalkylene oxide (e.g., PEG) and the molecular weight of the polyalkylene oxide (e.g., PEG) is about 200, 300, 400, 500, 600, 700, 800, 900, 1000, 1100, 1200, 1300, 1400, 1450, 1500, 1600, 1700, 1800, 1900, 2000, 2100, 2200, 2300, 2400, 2500, 2600, 2700, 2800, 2900, 3000, 3250, 3350, 3500, 3750, 4000, 4250, 4500, 4600, 4750, 5000, 5500, 6000, 6500, 7000, 7500, 8000, 10,000, 12,000, 20,000, 35,000, 40,000, 50,000, 60,000, or 100,000 Da.

[0398] In some embodiments, the polyalkylene oxide (e.g., PEG) is a discrete PEG, in which the discrete PEG is a polymeric PEG comprising more than one repeating ethylene oxide unit. In some embodiments, a discrete PEG (dPEG) comprises from 2 to 60, from 2 to 50, or from 2 to 48 repeating ethylene oxide units. In some embodiments, a dPEG comprises about 2, 3, 4, 5, 6, 7, 8, 9, 10, 11, 12, 13, 14, 15, 16, 17, 18, 19, 20, 22, 24, 26, 28, 30, 35, 40, 42, 48, 50 or more repeating ethylene oxide units. In some embodiments, a dPEG comprises about 2 or more repeating ethylene oxide units. In some embodiments, a dPEG is synthesized as a single molecular weight compound from pure (e.g., about 95%, 98%, 99%, or 99.5%) starting material in a step-wise fashion. In some embodiments, a dPEG has a specific molecular weight, rather than an average molecular weight.

[0399] In some embodiments, the linker is a discrete PEG, optionally comprising from 2 to 60, from 2 to 50, or from 2 to 48 repeating ethylene oxide units. In some embodiments, the linker comprises a dPEG comprising about 2, 3, 4, 5, 6, 7, 8, 9, 10, 11, 12, 13, 14, 15, 16, 17, 18, 19, 20, 22, 24, 26, 28, 30, 35, 40, 42, 48, 50 or more repeating ethylene oxide units.

[0400] In some embodiments, the linker is a polypeptide linker. In some embodiments, the polypeptide linker comprises at least 2, 3, 4, 5, 6, 7, 8, 10, 15, 20, 25, 30, 35, 40, 45, 50, 60, 70, 80, 90, 100, or more amino acid residues. In some embodiments, the polypeptide linker comprises at least 2, 3, 4, 5, 6, 7, 8, or more amino acid residues. In some embodiments, the polypeptide linker comprises at most 2, 3, 4, 5, 6, 7, 8, or less amino acid residues. In some embodiments, the polypeptide linker is a cleavable polypeptide linker (e.g., either enzymatically or chemically). In some embodiments, the polypeptide linker is a non-cleavable polypeptide linker. In some embodiments, the polypeptide linker comprises Val-Cit (valine-citrulline), Gly-Gly-Phe-Gly, Phe-Lys, Val-Lys, Gly-Phe-Lys, Phe-Phe-Lys, Ala-Lys, Val-Arg, Phe-Cit, Phe-Arg, Leu-Cit, Ile-Cit, Trp-Cit, Phe-Ala, Ala-Leu-Ala-Leu, or Gly-Phe-Leu-Gly. In some embodiments, the polypeptide linker comprises a peptide such as: Val-Cit (valine-citrulline), Gly-Gly-Phe-Gly, Phe-Lys, Val-Lys, Gly-Phe-Lys, Phe-Phe-Lys, Ala-Lys, Val-Arg, Phe-Cit, Phe-Arg, Leu-Cit, Ile-Cit, Trp-Cit, Phe-Ala, Ala-Leu-Ala-Leu, or Gly-Phe-Leu-Gly. In some embodiments, the polypeptide linker comprises L-amino acids, D-amino acids, or a mixture of both L- and D-amino acids.

[0401] In some embodiments, the linker comprises a homobifunctional linker. Exemplary homobifunctional linkers include, but are not limited to, Lomant's reagent dithiobis (succinimidylpropionate) DSP, 3′3′-dithiobis(sulfosuccinimidyl proprionate (DTSSP), disuccinimidyl suberate (DSS), bis(sulfosuccinimidyl)suberate (BS), disuccinimidyl tartrate (DST), disulfosuccinimidyl tartrate (sulfo DST), ethylene glycobis(succinimidylsuccinate) (EGS), disuccinimidyl glutarate (DSG), N,N′-disuccinimidyl carbonate (DSC), dimethyl adipimidate (DMA), dimethyl pimelimidate (DMP), dimethyl suberimidate (DMS), dimethyl-3,3′-dithiobispropionimidate (DTBP), 1,4-di-3′-(2′-pyridyldithio)propionamido)butane (DPDPB), bismaleimidohexane (BMH), aryl halide-containing compound (DFDNB), such as e.g. 1,5-difluoro-2,4-dinitrobenzene or 1,3-difluoro-4,6-dinitrobenzene, 4,4′-difluoro-3,3′-dinitrophenylsulfone (DFDNPS), bis-[β-(4-azidosalicylamido)ethyl]disulfide (BASED), formaldehyde, glutaraldehyde, 1,4-butanediol diglycidyl ether, adipic acid dihydrazide, carbohydrazide, o-toluidine, 3,3′-dimethylbenzidine, benzidine, α,α′-p-diaminodiphenyl, diiodo-p-xylene sulfonic acid, N,N′-ethylene-bis(iodoacetamide), or N,N′-hexamethylene-bis(iodoacetamide).

[0402] In some embodiments, the linker comprises a heterobifunctional linker. Exemplary heterobifunctional linker include, but are not limited to, amine-reactive and sulfhydryl cross-linkers such as N-succinimidyl 3-(2-pyridyldithio)propionate (sPDP), long-chain N-succinimidyl 3-(2-pyridyldithio)propionate (LC-sPDP), water-soluble-long-chain N-succinimidyl 3-(2-pyridyldithio) propionate (sulfo-LC-sPDP), succinimidyloxycarbonyl-α-methyl-α-(2-pyridyldithio)toluene (sMPT), sulfosuccinimidyl-6-[α-methyl-α-(2-pyridyldithio)toluamido]hexanoate (sulfo-LC-sMPT), succinimidyl-4-(N-maleimidomethyl)cyclohexane-1-carboxylate (sMCC), sulfosuccinimidyl-4-(N-maleimidomethyl)cyclohexane-1-carboxylate (sulfo-sMCC), m-maleimidobenzoyl-N-hydroxysuccinimide ester (MBs), m-maleimidobenzoyl-N-hydroxysulfosuccinimide ester (sulfo-MBs), N-succinimidyl(4-iodoacteyl)aminobenzoate (sIAB), sulfosuccinimidyl(4-iodoacteyl)aminobenzoate (sulfo-sIAB), succinimidyl-4-(p-maleimidophenyl)butyrate (sMPB), sulfosuccinimidyl-4-(p-maleimidophenyl)butyrate (sulfo-sMPB), N-(γ-maleimidobutyryloxy) succinimide ester (GMBs), N-(γ-maleimidobutyryloxy)sulfosuccinimide ester (sulfo-GMBs), succinimidyl 6-((iodoacetyl)amino)hexanoate (sIAX), succinimidyl 6-[6-(((iodoacetyl)amino)hexanoyl)amino]hexanoate (sIAXX), succinimidyl 4-(((iodoacetyl)amino)methyl)cyclohexane-1-carboxylate (sIAC), succinimidyl 6-((((4-iodoacetyl)amino)methyl)cyclohexane-1-carbonyl)amino) hexanoate (sIACX), p-nitrophenyl iodoacetate (NPIA), carbonyl-reactive and sulfhydryl-reactive cross-linkers such as 4-(4-N-maleimidophenyl)butyric acid hydrazide (MPBH), 4-(N-maleimidomethyl)cyclohexane-1-carboxyl-hydrazide-8 (M2C2H), 3-(2-pyridyldithio)propionyl hydrazide (PDPH), amine-reactive and photoreactive cross-linkers such as N-hydroxysuccinimidyl-4-azidosalicylic acid (NHs-AsA), N-hydroxysulfosuccinimidyl-4-azidosalicylic acid (sulfo-NHs-AsA), sulfosuccinimidyl-(4-azidosalicylamido)hexanoate (sulfo-NHs-LC-AsA), sulfosuccinimidyl-2-(p-azidosalicylamido)ethyl-1,3′-dithiopropionate (sAsD), N-hydroxysuccinimidyl-4-azidobenzoate (HsAB), N-hydroxysulfosuccinimidyl-4-azidobenzoate (sulfo-HsAB), N-succinimidyl-6-(4′-azido-2′-nitrophenylamino)hexanoate (sANPAH), sulfosuccinimidyl-6-(4′-azido-2′-nitrophenylamino)hexanoate (sulfo-sANPAH), N-5-azido-2-nitrobenzoyloxysuccinimide (ANB—NOs), sulfosuccinimidyl-2-(m-azido-o-nitrobenzamido)-ethyl-1,3′-dithiopropionate (sAND), N-succinimidyl-4(4-azidophenyl) 1,3′-dithiopropionate (sADP), N-sulfosuccinimidyl(4-azidophenyl)-1,3′-dithiopropionate (sulfo-sADP), sulfosuccinimidyl 4-(p-azidophenyl)butyrate (sulfo-sAPB), sulfosuccinimidyl 2-(7-azido-4-methylcoumarin-3-acetamide)ethyl-1,3′-dithiopropionate (sAED), sulfosuccinimidyl 7-azido-4-methylcoumain-3-acetate (sulfo-sAMCA), p-nitrophenyl diazopyruvate (pNPDP), p-nitrophenyl-2-diazo-3,3,3-trifluoropropionate (PNP-DTP), sulfhydryl-reactive and photoreactive cross-linkers such as 1-(p-Azidosalicylamido)-4-(iodoacetamido)butane (AsIB), N-[4-(p- azidosalicylamido)butyl]-3′-(2′-pyridyldithio)propionamide (APDP), benzophenone-4-iodoacetamide, benzophenone-4-maleimide carbonyl-reactive and photoreactive cross-linkers such as p-azidobenzoyl hydrazide (ABH), carboxylate-reactive and photoreactive cross-linkers such as 4-(p-azidosalicylamido)butylamine (AsBA), and arginine-reactive and photoreactive cross-linkers such as p-azidophenyl glyoxal (APG).

[0403] In some embodiments, the linker comprises a benzoic acid group, or its derivatives thereof. In some embodiments, the benzoic acid group or its derivatives thereof comprise paraaminobenzoic acid (PABA). In some embodiments, the benzoic acid group or its derivatives thereof comprise gamma-aminobutyric acid (GABA).

[0404] In some embodiments, the linker comprises one or more of a maleimide group, a peptide moiety, and/or a benzoic acid group, in any combination. In some embodiments, the linker comprises a combination of a maleimide group, a peptide moiety, and/or a benzoic acid group. In some embodiments, the maleimide group is maleimidocaproyl (mc). In some embodiments, the peptide group is val-cit. In some embodiments, the benzoic acid group is PABA. In some embodiments, the linker comprises a mc-val-cit group. In some embodiments, the linker comprises a val-cit-PABA group. In additional cases, the linker comprises a mc-val-cit-PABA group.

[0405] In some embodiments, the linker is a self-immolative linker or a self-elimination linker. In some embodiments, the linker is a self-immolative linker. In other cases, the linker is a self-elimination linker (e.g., a cyclization self-elimination linker). In some embodiments, the linker comprises a linker described in U.S. Pat. No. 9,089,614 or PCT Publication No. WO2015038426.

[0406] In some embodiments, the linker is a dendritic type linker. In some embodiments, the dendritic type linker comprises a branching, multifunctional linker moiety. In some embodiments, the dendritic type linker comprises PAMAM dendrimers.

[0407] In some embodiments, the linker is a traceless linker or a linker in which after cleavage does not leave behind a linker moiety (e.g., an atom or a linker group) to the antibody or payload. Exemplary traceless linkers include, but are not limited to, germanium linkers, silicium linkers, sulfur linkers, selenium linkers, nitrogen linkers, phosphorus linkers, boron linkers, chromium linkers, or phenylhydrazide linker. In some embodiments, the linker is a traceless aryl-triazene linker as described in Hejesen, et al., “A traceless aryl-triazene linker for DNA-directed chemistry,” Org Biomol Chem 11(15): 2493-2497 (2013). In some embodiments, the linker is a traceless linker described in Blaney, et al., “Traceless solid-phase organic synthesis,” Chem. Rev. 102: 2607-2024 (2002). In some embodiments, a linker is a traceless linker as described in U.S. Pat. No. 6,821,783.

### Host Cells for Antibody Production

[0408] In some embodiments, the present disclosure provides host cells expressing any one of the anti-Gal3 antibodies or binding fragments thereof disclosed herein. A subject host cell typically comprises a nucleic acid encoding any one of the anti-Gal3 antibodies or binding fragments thereof disclosed herein.

[0409] The disclosure provides host cells transfected with the polynucleotides, vectors, or a library of the vectors described above. The vectors can be introduced into a suitable prokaryotic or eukaryotic cell by any of a number of appropriate means, including electroporation, microprojectile bombardment; lipofection, infection (where the vector is coupled to an infectious agent), transfection employing calcium chloride, rubidium chloride, calcium phosphate, DEAE-dextran, or other substances. The choice of the means for introducing vectors will often depend on features of the host cell.

[0410] For most animal cells, any of the above-mentioned methods is suitable for vector delivery. Preferred animal cells are vertebrate cells, preferably mammalian cells, capable of expressing exogenously introduced gene products in large quantity, e.g. at the milligram level. Non-limiting examples of preferred cells are NIH3T3 cells, COS, HeLa, and CHO cells.

[0411] Once introduced into a suitable host cell, expression of the anti-Gal3 antibodies or binding fragments thereof can be determined using any nucleic acid or protein assay known in the art. For example, the presence of transcribed mRNA of light chain CDRs or heavy chain CDRs, or the anti-Gal3 antibody or binding fragment thereof can be detected and/or quantified by conventional hybridization assays (e.g. Northern blot analysis), amplification procedures (e.g. RT-PCR), SAGE (U.S. Pat. No. 5,695,937), and array-based technologies (see e.g. U.S. Pat. Nos. 5,405,783, 5,412,087 and 5,445,934), using probes complementary to any region of a polynucleotide that encodes the anti-Gal3 antibody or binding fragment thereof.

[0412] Expression of the vector can also be determined by examining the expressed anti-Gal3 antibody or binding fragment thereof. A variety of techniques are available in the art for protein analysis. They include but are not limited to radioimmunoassays, ELISA (enzyme linked immunoradiometric assays), “sandwich” immunoassays, immunoradiometric assays, in situ immunoassays (using e.g., colloidal gold, enzyme or radioisotope labels), western blot analysis, immunoprecipitation assays, immunofluorescent assays, and SDS-PAGE.

[0413] The invention is generally disclosed herein using affirmative language to describe the numerous embodiments. The invention also includes embodiments in which subject matter is excluded, in full or in part, such as substances or materials, method steps and conditions, protocols, or procedures.

[0414] Embodiments of the present invention provided herein are described by way of the following numbered arrangements:

[0415] 1. An anti-Gal3 antibody or binding fragment thereof comprising (1) a light chain variable region comprising a V_{L}-CDR1, a V_{L}-CDR2, and a V_{L}-CDR3; and (2) a heavy chain variable region comprising a V_{H}-CDR1, a V_{H}-CDR2, and a V_{H}-CDR3, wherein the V_{L}-CDR1 comprises an amino acid sequence having at least 60%, at least 70%, at least 80%, at least 90%, or 100% sequence identity to any amino acid sequence according to SEQ ID NOs: 170-220, the V_{L}-CDR2 comprises an amino acid sequence having at least 60%, at least 70%, at least 80%, at least 90%, or 100% sequence identity to any amino acid sequence according to SEQ ID NOs: 221-247, the V_{L}-CDR3 comprises an amino acid sequence having at least 60%, at least 70%, at least 80%, at least 90%, or 100% sequence identity to any amino acid sequence according to SEQ ID NOs: 248-296, the V_{H}-CDR1 comprises an amino acid sequence having at least 60%, at least 70%, at least 80%, at least 90%, or 100% sequence identity to any amino acid sequence according to SEQ ID NOs: 27-70, the V_{H}-CDR2 comprises an amino acid sequence having at least 60%, at least 70%, at least 80%, at least 90%, or 100% sequence identity to any amino acid sequence according to SEQ ID NOs: 71-111, 826, and the V_{H}-CDR3 comprises an amino acid sequence having at least 60%, at least 70%, at least 80%, at least 90%, or 100% sequence identity to any amino acid sequence according to SEQ ID NOs: 112-169, 827.

[0416] 2. The anti-Gal3 antibody or binding fragment thereof of arrangement 1, wherein the anti-Gal3 antibody or binding fragment comprises a combination of a V_{L}-CDR1, a V_{L}-CDR2, a V_{L}-CDR3, a V_{H}-CDR1, a V_{H}-CDR2, and a V_{H}-CDR3 as illustrated in FIG. 14.

[0417] 3. The anti-Gal3 antibody or binding fragment thereof of arrangement 1 or 2, wherein the light chain variable region comprises a sequence having at least 80%, 81%, 82%, 83%, 84%, 85%, 86%, 87%, 88%, 89%, 90%, 91%, 92%, 93%, 94%, 95%, 96%, 97%, 98%, or 99% identity to the sequence selected from SEQ ID NOs: 374-447, 823-825.

[0418] 4. The anti-Gal3 antibody or binding fragment thereof of any one of arrangements 1-3, wherein the light chain variable region comprises the sequence selected from SEQ ID NOs: 374-447, 823-825.

[0419] 5. The anti-Gal3 antibody or binding fragment thereof of any one of arrangements 1-4, wherein the heavy chain variable region comprises a sequence having at least 80%, 81%, 82%, 83%, 84%, 85%, 86%, 87%, 88%, 89%, 90%, 91%, 92%, 93%, 94%, 95%, 96%, 97%, 98%, or 99% identity to the sequence selected from SEQ ID NOs: 297-373, 822, 828.

[0420] 6. The anti-Gal3 antibody or binding fragment thereof of any one of arrangements 1-5, wherein the heavy chain variable region comprises the sequence selected from SEQ ID NOs: 297-373, 822, 828.

[0421] 7. The anti-Gal3 antibody or binding fragment thereof of any one of arrangements 1-6, wherein the anti-Gal3 antibody or binding fragment thereof comprises a light chain, wherein the light chain comprises a sequence having at least 80%, 81%, 82%, 83%, 84%, 85%, 86%, 87%, 88%, 89%, 90%, 91%, 92%, 93%, 94%, 95%, 96%, 97%, 98%, or 99% identity to the sequence selected from SEQ ID NOs: 495-538, 830.

[0422] 8. The anti-Gal3 antibody or binding fragment thereof of arrangement 7, wherein the light chain comprises the sequence selected from SEQ ID NOs: 495-538, 830.

[0423] 9. The anti-Gal3 antibody or binding fragment thereof of any one of arrangements 1-8, wherein the anti-Gal3 antibody or binding fragment thereof comprises a heavy chain, wherein the heavy chain comprises a sequence having at least 80%, 81%, 82%, 83%, 84%, 85%, 86%, 87%, 88%, 89%, 90%, 91%, 92%, 93%, 94%, 95%, 96%, 97%, 98%, or 99% identity to the sequence selected from SEQ ID NOs: 448-494, 829.

[0424] 10. The anti-Gal3 antibody or binding fragment thereof of arrangement 9, wherein the heavy chain comprises the sequence selected from SEQ ID NOs: 448-494, 829.

[0425] 11. The anti-Gal3 antibody or binding fragment thereof of any one of arrangements 1-10, wherein the anti-Gal3 antibody or binding fragment is selected from the group consisting of: TB001, TB006, 12G5.D7, 13A12.2E5, 14H10.2C9, 15F10.2D6, 19B5.2E6, 20D11.2C6, 20H5.A3, 23H9.2E4, 2D10.2B2, 3B11.2G2, 7D8.2D8, mIMT001, 4A11.2B5, 4A11.H1L1, 4A11.H4L2, 4G2.2G6, 6B3.2D3, 6H6.2D6, 9H2.2H10, 13G4.2F8, 13H12.2F8, 15G7.2A7, 19D9.2E5, 23B10.2B12, 24D12.2H9, F846C.1B2, F846C.1F5, F846C.1H12, F846C.1H5, F846C.2H3, F846TC.14A2, F846TC.14E4, F846TC.16B5, F846TC.7F10, F847C.10B9, F847C.11B1, F847C.12F12, F847C.26F5, F847C.4B10, F849C.8D10, F849C.8H3, 846.2B11, 846.4D5, 846T.1H2, 847.14H4, 846.2D4, 846.2F11, 846T.10B1, 846T.2E3, 846T.4C9, 846T.4E11, 846T.4F5, 846T.8D1, 847.10C9, 847.11D6, 847.15D12, 847.15F9, 847.15H11, 847.20H7, 847.21B11, 847.27B9, 847.28D1, 847.2B8, 847.3B3, 849.1D2, 849.2D7, 849.2F12, 849.4B2, 849.4F12, 849.4F2, 849.5C2, 849.8D12, F847C.21H6, 849.5H1, 847.23F11, 847.16D10, 847.13E2-mH0mL1, 847.13E2-mH0mL2, 847.12C4, 847.4D3, 2D10-VH0-VL0, or binding fragment thereof.

[0426] 12. A method of treating lung fibrosis in a subject in need thereof, comprising: administering to the subject an effective amount of an anti-Gal3 antibody or binding fragment thereof;

[0427] wherein the anti-Gal3 antibody or binding fragment thereof disrupts an interaction between Gal3 and a TGF-b receptor; and

[0428] wherein the lung fibrosis is a sequela of a viral infection.

[0429] 13. The method of arrangement 12, wherein the viral infection is a coronavirus infection.

[0430] 14. The method of arrangement 12 or 13, wherein the viral infection is a SARS-related coronavirus infection.

[0431] 15. The method of any one of arrangements 12-14, wherein the viral infection is a SARS-CoV-2 coronavirus infection.

[0432] 16. A method of disrupting an interaction between Gal3 and a SARS-CoV-2-associated host cell receptor comprising:

[0433] contacting the SARS-CoV-2-associated host cell receptor with an anti-Gal3 antibody or binding fragment thereof;

[0434] wherein the SARS-CoV-2-associated host cell receptor is ACE2 or CD147.

[0435] 17. A method of disrupting an interaction between Gal3 and a SARS-CoV-2 S protein comprising:

[0436] contacting the SARS-CoV-2 S protein with an anti-Gal3 antibody or binding fragment thereof.

[0437] 18. A method of treating a SARS-CoV-2 infection in a subject in need thereof, comprising:

[0438] administering to the subject an effective amount of an anti-Gal3 antibody or binding fragment thereof;

[0439] wherein the anti-Gal3 antibody or binding fragment thereof disrupts an interaction between Gal3 and a SARS-CoV-2-associated host cell receptor or a SAR-CoV-2 protein; and

[0440] wherein the SARS-CoV-2 associated host cell receptor is ACE2 or CD147 or the SARS-CoV-2 protein is the SARS-CoV-2 S protein.

[0441] 19. A method of treating a viral infection in a subject in need thereof, comprising: administering to the subject an effective amount of an anti-Gal3 antibody or binding fragment thereof;

[0442] wherein the anti-Gal3 antibody or binding fragment thereof disrupts an interaction between Gal3 and a viral protein.

[0443] 20. The method of arrangement 19, wherein the viral infection is a coronavirus infection and the viral protein is a coronavirus protein.

[0444] 21. The method of arrangement 19 or 20, wherein the viral infection is a SARS-related coronavirus infection and the viral protein is a SARS-related coronavirus protein.

[0445] 22. The method of any one of arrangements 19-21, wherein the viral infection is a SARS-CoV-2 viral infection and the viral protein is a SARS-CoV-2 S protein.

[0446] 23. A method of treating SARS-CoV-2 infection, comprising:

[0447] administering to a subject an effective amount of an anti-Gal3 antibody or binding fragment thereof, wherein the anti-Gal3 antibody or binding fragment thereof disrupts an interaction between Gal3 and a SARS-CoV-2 S protein, and wherein the anti-Gal3 antibody is capable of binding to:

[0448] (a) Gal3 on a SARS-CoV-2 virus, or

[0449] (b) Gal3 associated with a cell.

[0450] 24. The method of arrangement 23, wherein the Gal3 associated with a cell is a Gal3 expressed by the cell.

[0451] 25. The method of arrangement 24, wherein the Gal3 associated with a cell is a Gal3 bound to the cell surface.

[0452] 26. A method of preventing and/or reducing a viral spread, the method comprising:

[0453] administering to a subject an effective amount of an anti-Gal3 antibody or binding fragment thereof, wherein the anti-Gal3 antibody or binding fragment thereof disrupts an interaction between Gal3 and ACE2 and/or Gal3 and CD147.

[0454] 27. A method of reducing a risk that a virus can invade a cell, the method comprising:

[0455] administering to a cell an anti-Gal3 antibody or binding fragment thereof, wherein the anti-Gal3 antibody or binding fragment thereof disrupts an interaction between Gal3 and ACE2 and/or Gal3 and CD147.

[0456] 28. A method of decreasing or inhibiting toxicity in a subject experiencing cytokine release syndrome (CRS) or vulnerable to CRS, the method comprising:

[0457] administering to the subject an effective amount of an anti-Gal3 antibody or binding fragment thereof.

[0458] 29. The method of arrangement 28, wherein the CRS is a result of a bacterial infection, viral infection, fungal infection, protozoan infection, graft-versus-host disease, cytomegalovirus, Epstein-Barr virus, hemophagocytic lymphohistiocystosis (HLH), Epstein-Barr virus-associated HLH, sporadic HLH, macrophage activation syndrome (MAS), chronic arthritis, systemic Juvenile idiopathic Arthritis (sJIA), Still's Disease, Cryopyrin-associated Periodic Syndrome (CAPS), Familial Cold Auto-inflammatory Syndrome (FCAS), Familial Cold Urticaria (FCU), Muckle-Well Syndrome (MWS), Chronic Infantile Neurological Cutaneous and Articular (CINCA) Syndrome, cryopyrinopathy comprising inherited or de novo gain of function mutations in the NLRP3 gene, a hereditary auto-inflammatory disorder, acute pancreatitis, severe burns, trauma, acute respiratory distress syndrome (ARDS), Streptococcus, Pseudomonas, influenza, bird flu, H5N1, H1N1, variola virus, coronavirus, severe acute respiratory syndrome (SARS), SARS-CoV-1, SARS-CoV-2, sepsis, gram-negative sepsis, Gram-positive toxins, malaria, Ebola virus, variola virus, systemic Gram-negative bacterial infection, bacteremia, Jarisch-Herxheimer syndrome, glycosylphosphatidylinositol (GPI), or lipopolysaccharide, or treatment with an immunotherapy comprising rituximab, obinutuzumab, alemtuzumab, brentuximab, dacetuzumab, nivolumab, theralizumab, oxaliplatin, lenalidomide, T-cell engager molecules, bi-specific T-cell engager (BiTE) molecules, or CAR T therapy.

[0459] 30. The method of arrangement 29, wherein the CRS is a result of sepsis.

[0460] 31. The method of arrangement 29 or 30, wherein the sepsis is bacterial sepsis, viral sepsis, fungal sepsis, or protozoan sepsis.

[0461] 32. The method of any one of arrangements 28-31, wherein the CRS is a result of a viral infection.

[0462] 33. The method of any one of arrangements 28-32, wherein the CRS is a result of a coronavirus infection.

[0463] 34. The method of any one of arrangements 28-33, wherein the CRS is a result of a SARS-related coronavirus infection.

[0464] 35. The method of any one of arrangements 28-34, wherein the CRS is a result of a SARS-CoV-2 coronavirus infection.

[0465] 36. A method of decreasing or inhibiting inflammation in a subject in need thereof, the method comprising:

[0466] administering to the subject an effective amount of an anti-Gal3 antibody or binding fragment thereof.

[0467] 37. The method of arrangement 36, wherein the inflammation in the subject is associated with neutrophil activation and/or migration.

[0468] 38. The method of arrangement 36 or 37, wherein administration of the effective amount of the anti-Gal3 antibody or binding fragment thereof decreases or inhibits neutrophil activation and/or migration in the subject.

[0469] 39. The method of any one of arrangements 36-38, wherein administration of the effective amount of the anti-Gal3 antibody or binding fragment thereof decreases or inhibits cleavage of CD62L expressed by neutrophils and/or decreases or inhibits IL-8 production in the subject.

[0470] 40. The method of any one of arrangements 36-39, further comprising detecting a decrease in neutrophil CD62L cleavage and/or a decrease in IL-8 production in the subject after the administering step.

[0471] 41. The method of any one of arrangements 36-40, wherein administration of the effective amount of the anti-Gal3 antibody or binding fragment thereof decreases the number of neutrophils in the subject.

[0472] 42. The method of any one of arrangements 36-41, further comprising detecting a decrease in the number of neutrophils in the subject after the administering step.

[0473] 43. The method of any one of arrangements 36-42, wherein administration of the effective amount of the anti-Gal3 antibody or binding fragment thereof modulates expression of Gal3, myeloperoxidase (MPO), growth-related oncogene α (GROα)/keratinocytes-derived chemokine (KC), Ly6c1, INOS, IL-6, TNFα, IL-1B, Col1A1, aSMA, TGFβ, VEGFA, VEGFB, or any combination thereof, in the subject.

[0474] 44. The method of any one of arrangements 36-43, further comprising detecting a change in expression of Gal3, MPO, GROα/KC, Ly6c1, INOS, IL-6, TNFα, IL-1B, Col1A1, aSMA, TGFβ, VEGFA, VEGFB, or any combination thereof, in the subject after the administrating step.

[0475] 45. The method of any one of arrangements 36-44, wherein administration of the effective amount of the anti-Gal3 antibody or binding fragment thereof decreases production of autoantibodies in the subject.

[0476] 46. The method of arrangement 45, wherein the autoantibodies are anti-nucleic acid autoantibodies.

[0477] 47. The method of any one of arrangements 36-46, wherein the inflammation comprises lung inflammation.

[0478] 48. The method of any one of arrangements 36-47, wherein the inflammation comprises COPD, pneumonitis, asthma, sarcoidosis, pulmonary fibrosis, histiocytosis, bronchiolitis obliterans, or any combination thereof.

[0479] 49. The method of any one of arrangements 36-48, wherein the inflammation comprises an autoimmune disease.

[0480] 50. The method of arrangement 49, wherein the autoimmune disease comprises systemic lupus erythematosus (SLE), Graves' disease, rheumatoid arthritis, multiple sclerosis, Sjogren's syndrome, celiac disease, or any combination thereof.

[0481] 51. The method of any one of arrangements 36-50, further comprising detecting an improvement in the inflammation in the subject after the administrating step.

[0482] 52. A method of decreasing or inhibiting cleavage of CD62L, decreasing IL-8 production, and/or modulating expression of Gal3, MPO, GROα/KC, Ly6c1, INOS, IL-6, TNFα, IL-1B, Col1A1, aSMA, TGFβ, VEGFA, VEGFB, or any combination thereof, by a cell, comprising contacting the cell with an anti-Gal3 antibody or binding fragment thereof, thereby decreasing or inhibiting cleavage of CD62L, decreasing IL-8 production, and/or modulating expression of Gal3, MPO, GROα/KC, Ly6c1, INOS, IL-6, TNFα, IL-1B, Col1A1, aSMA, TGFβ, VEGFA, VEGFB, or any combination thereof, by the cell.

[0483] 53. The method of arrangement 52, wherein the cell is an immune cell.

[0484] 54. The method of arrangement 53, wherein the immune cell is a neutrophil.

[0485] 55. The method of any one of arrangements 52-54, wherein cleavage of CD62L is decreased by at least 60%, 65%, 70%, 75%, 80%, 85%, 90%, 95%, 96%, 97%, 98%, 99%, or 100%, IL-8 production is decreased by at least 1%, 2%, 3%, 4%, 5%, 10%, 15%, 20%, 25%, 30%, 35%, 40%, 45%, 50%, 55%, 60%, 65%, 70%, 75%, 80%, 85%, 90%, 95%, or 100%, TNFα expression is decreased by at least 10%, 15%, 20%, 25%, 30%, 35%, 40%, 45%, 50%, 55%, 60%, 65%, 70%, 75%, 80%, 85%, 90%, 95%, or 100%, and/or IL-6 expression is decreased by at least 10%, 15%, 20%, 25%, 30%, 35%, 40%, 45%, 50%, 55%, 60%, 65%, 70%, 75%, 80%, 85%, 90%, 95%, or 100%.

[0486] 56. The method of any one of arrangements 52-55, wherein the decrease or inhibition of cleavage of CD62L, decrease in IL-8 production, and/or change in expression of Gal3, MPO, GROα/KC, Ly6c1, INOS, IL-6, TNFα, IL-1B, Col1A1, aSMA, TGFβ, VEGFA, VEGFB, or any combination thereof is determined by ELISA.

[0487] 57. The method of any one of arrangements 12-35, wherein the anti-Gal3 antibody or binding fragment thereof is specific for the N-terminus of Gal3, the N-terminal domain of Gal3, or the tandem repeat domain (TRD) of Gal3.

[0488] 58. The method of any one of arrangements 12-57, wherein the anti-Gal3 antibody or binding fragment thereof binds to the N-terminus of Gal3.

[0489] 59. The method of any one of arrangements 12-58, wherein the anti-Gal3 antibody or binding fragment thereof binds to the N-terminal domain of Gal3.

[0490] 60. The method of any one of arrangements 12-59, wherein the anti-Gal3 antibody or binding fragment thereof binds to the tandem repeat domain of Gal3.

[0491] 61. The method of any one of arrangements 12-60, wherein the anti-Gal3 antibody or binding fragment thereof binds to Peptide 1 (ADNFSLHDALSGSGNPNPQG; SEQ ID NO: 3).

[0492] 62. The method of any one of arrangements 12-61, wherein the anti-Gal3 antibody or binding fragment thereof binds to Peptide 6 (GAYPGQAPPGAYPGAPGAYP; SEQ ID NO: 8).

[0493] 63. The method of any one of arrangements 12-62, wherein the anti-Gal3 antibody or binding fragment thereof binds to Peptide 7 (AYPGAPGAYPGAPAPGVYPG; SEQ ID NO: 9).

[0494] 64. The method of any one of arrangements 12-63, wherein the anti-Gal3 antibody or binding fragment thereof comprises (1) a light chain variable region comprising a V_{L}-CDR1, a V_{L}-CDR2, and a V_{L}-CDR3; and (2) a heavy chain variable region comprising a V_{H}-CDR1, a V_{H}-CDR2, and a V_{H}-CDR3, wherein

[0495] the V_{L}-CDR1 comprises an amino acid sequence having at least 60%, at least 70%, at least 80%, at least 90%, or 100% sequence identity to any amino acid sequence according to SEQ ID NOs: 170-220,

[0496] the V_{L}-CDR2 comprises an amino acid sequence having at least 60%, at least 70%, at least 80%, at least 90%, or 100% sequence identity to any amino acid sequence according to SEQ ID NOs: 221-247,

[0497] the V_{L}-CDR3 comprises an amino acid sequence having at least 60%, at least 70%, at least 80%, at least 90%, or 100% sequence identity to any amino acid sequence according to SEQ ID NOs: 248-296,

[0498] the V_{H}-CDR1 comprises an amino acid sequence having at least 60%, at least 70%, at least 80%, at least 90%, or 100% sequence identity to any amino acid sequence according to SEQ ID NOs: 27-70,

[0499] the V_{H}-CDR2 comprises an amino acid sequence having at least 60%, at least 70%, at least 80%, at least 90%, or 100% sequence identity to any amino acid sequence according to SEQ ID NOs: 71-111, 826, and

[0500] the V_{H}-CDR3 comprises an amino acid sequence having at least 60%, at least 70%, at least 80%, at least 90%, or 100% sequence identity to any amino acid sequence according to SEQ ID NOs: 112-169, 827.

[0501] 65. The method of any one of arrangements 12-64, wherein the anti-Gal3 antibody or binding fragment comprises a combination of a V_{L}-CDR1, a V_{L}-CDR2, a V_{L}-CDR3, a V_{H}-CDR1, a V_{H}-CDR2, and a V_{H}-CDR3 as illustrated in FIG. 14.

[0502] 66. The method of arrangement 64 or 65, wherein the light chain variable region comprises a sequence having at least 80%, 81%, 82%, 83%, 84%, 85%, 86%, 87%, 88%, 89%, 90%, 91%, 92%, 93%, 94%, 95%, 96%, 97%, 98%, or 99% identity to the sequence selected from SEQ ID NOs: 374-449.

[0503] 67. The method of any one of arrangements 64-66, wherein the light chain variable region comprises the sequence selected from SEQ ID NOs: 374-449.

[0504] 68. The method of any one of arrangements 64-67, wherein the heavy chain variable region comprises a sequence having at least 80%, 81%, 82%, 83%, 84%, 85%, 86%, 87%, 88%, 89%, 90%, 91%, 92%, 93%, 94%, 95%, 96%, 97%, 98%, or 99% identity to the sequence selected from SEQ ID NOs: 297-373, 822, 828.

[0505] 69. The method of any one of arrangements 64-68, wherein the heavy chain variable region comprises the sequence selected from SEQ ID NOs: 297-373, 822, 828.

[0506] 70. The method of any one of arrangements 64-69, wherein the anti-Gal3 antibody or binding fragment thereof comprises a light chain, wherein the light chain comprises a sequence having at least 80%, 81%, 82%, 83%, 84%, 85%, 86%, 87%, 88%, 89%, 90%, 91%, 92%, 93%, 94%, 95%, 96%, 97%, 98%, or 99% identity to the sequence selected from SEQ ID NOs: 495-538, 830.

[0507] 71. The method of arrangement 70, wherein the light chain comprises the sequence selected from SEQ ID NOs: 495-538, 830.

[0508] 72. The method of any one of arrangements 64-71, wherein the anti-Gal3 antibody or binding fragment thereof comprises a heavy chain, wherein the heavy chain comprises a sequence having at least 80%, 81%, 82%, 83%, 84%, 85%, 86%, 87%, 88%, 89%, 90%, 91%, 92%, 93%, 94%, 95%, 96%, 97%, 98%, or 99% identity to the sequence selected from SEQ ID NOs: 448-494, 829.

[0509] 73. The method of arrangement 72, wherein the heavy chain comprises the sequence selected from SEQ ID NOs: 448-494, 829.

[0510] 74. The method of any one of arrangements 12-73, wherein the anti-Gal3 antibody or binding fragment thereof is selected from the group consisting of: TB001, TB006, 12G5.D7, 13A12.2E5, 14H10.2C9, 15F10.2D6, 19B5.2E6, 20D11.2C6, 20H5.A3, 23H9.2E4, 2D10.2B2, 3B11.2G2, 7D8.2D8, mIMT001, 4A11.2B5, 4A11.H1L1, 4A11.H4L2, 4G2.2G6, 6B3.2D3, 6H6.2D6, 9H2.2H10, 13G4.2F8, 13H12.2F8, 15G7.2A7, 19D9.2E5, 23B10.2B12, 24D12.2H9, F846C.1B2, F846C.1F5, F846C.1H12, F846C.1H5, F846C.2H3, F846TC.14A2, F846TC.14E4, F846TC.16B5, F846TC.7F10, F847C.10B9, F847C.11B1, F847C.12F12, F847C.26F5, F847C.4B10, F849C.8D10, F849C.8H3, 846.2B11, 846.4D5, 846T.1H2, 847.14H4, 846.2D4, 846.2F11, 846T.10B1, 846T.2E3, 846T.4C9, 846T.4E11, 846T.4F5, 846T.8D1, 847.10C9, 847.11D6, 847.15D12, 847.15F9, 847.15H11, 847.20H7, 847.21B11, 847.27B9, 847.28D1, 847.2B8, 847.3B3, 849.1D2, 849.2D7, 849.2F12, 849.4B2, 849.4F12, 849.4F2, 849.5C2, 849.8D12, F847C.21H6, 849.5H1, 847.23F11, 847.16D10, 847.13E2-mH0mL1, 847.13E2-mH0mL2, 847.12C4, 847.4D3, 2D10-VH0-VL0, or binding fragment thereof.

[0511] 75. The method of any one of arrangements 12-74, further comprising administering one or more antiviral or anti-inflammatory therapeutics selected from the group consisting of chloroquine, hydroxychloroquine, favipiravir, favilavir, remdesivir, tocilizumab, baricitinib, acalabrutinib, galidesivir, sarilumab, lopinavir, ritonavir, darunavir, ribavirin, dexamethasone, ciclesonide, convalescent plasma, interferon-α, pegylated interferon-α, and interferon alfa-2b, or any combination thereof.

[0512] 76. The use of an anti-Gal3 antibody or binding fragment thereof for the treatment of CRS.

[0513] 77. The use of arrangement 76, wherein the CRS is a result of a bacterial infection, viral infection, fungal infection, protozoan infection, graft-versus-host disease, cytomegalovirus, Epstein-Ban virus, hemophagocytic lymphohistiocystosis (HLH), Epstein-Ban virus-associated HLH, sporadic HLH, macrophage activation syndrome (MAS), chronic arthritis, systemic Juvenile idiopathic Arthritis (sJIA), Still's Disease, Cryopyrin-associated Periodic Syndrome (CAPS), Familial Cold Auto-inflammatory Syndrome (FCAS), Familial Cold Urticaria (FCU), Muckle-Well Syndrome (MWS), Chronic Infantile Neurological Cutaneous and Articular (CINCA) Syndrome, cryopyrinopathy comprising inherited or de novo gain of function mutations in the NLRP3 gene, a hereditary auto-inflammatory disorder, acute pancreatitis, severe burns, trauma, acute respiratory distress syndrome (ARDS), Streptococcus, Pseudomonas, influenza, bird flu, H5N1, H1N1, variola virus, coronavirus, severe acute respiratory syndrome (SARS), SARS-CoV-1, SARS-CoV-2, sepsis, gram-negative sepsis, Gram-positive toxins, malaria, Ebola virus, variola virus, systemic Gram-negative bacterial infection, bacteremia, Jarisch-Herxheimer syndrome, glycosylphosphatidylinositol (GPI), or lipopolysaccharide, or treatment with an immunotherapy comprising rituximab, obinutuzumab, alemtuzumab, brentuximab, dacetuzumab, nivolumab, theralizumab, oxaliplatin, lenalidomide, T-cell engager molecules, bi-specific T-cell engager (BiTE) molecules, or CAR T therapy.

[0514] 78. The use of arrangement 76 or 77, wherein the CRS is a result of sepsis.

[0515] 79. The use of any one of arrangements 76-78, wherein the sepsis is bacterial sepsis, viral sepsis, fungal sepsis, or protozoan sepsis.

[0516] 80. The use of an anti-Gal3 antibody or binding fragment thereof for the treatment of lung fibrosis, wherein the lung fibrosis is a sequela of a viral infection.

[0517] 81. The use of an anti-Gal3 antibody or binding fragment thereof for the treatment of a viral infection.

[0518] 82. The use of any one of arrangements 76-81, wherein the viral infection is a coronavirus infection.

[0519] 83. The use of any one of arrangements 76-82, wherein the viral infection is a SARS-related coronavirus infection.

[0520] 84. The use of any one of arrangements 76-83, wherein the viral infection is a SARS-CoV-2 coronavirus infection.

[0521] 85. The use of any one of arrangements 76-84, wherein the anti-Gal3 antibody or binding fragment thereof binds to the N-terminus of Gal3.

[0522] 86. The use of any one of arrangements 76-85, wherein the anti-Gal3 antibody or binding fragment thereof binds to the N-terminal domain of Gal3.

[0523] 87. The use of any one of arrangements 76-86, wherein the anti-Gal3 antibody or binding fragment thereof binds to the tandem repeat domain of Gal3.

[0524] 88. The use of any one of arrangements 76-87, wherein the anti-Gal3 antibody or binding fragment thereof binds to Peptide 1 (ADNFSLHDALSGSGNPNPQG; SEQ ID NO: 3).

[0525] 89. The use of any one of arrangements 76-87, wherein the anti-Gal3 antibody or binding fragment thereof binds to Peptide 6 (GAYPGQAPPGAYPGAPGAYP; SEQ ID NO: 8).

[0526] 90. The use of any one of arrangements 76-87, wherein the anti-Gal3 antibody or binding fragment thereof binds to Peptide 7 (AYPGAPGAYPGAPAPGVYPG; SEQ ID NO: 9).

[0527] 91. The use of any one of arrangements 76-90, wherein the anti-Gal3 antibody or binding fragment thereof comprises (1) a light chain variable region comprising a V_{L}-CDR1, a V_{L}-CDR2, and a V_{L}-CDR3; and (2) a heavy chain variable region comprising a V_{H}-CDR1, a V_{H}-CDR2, and a V_{H}-CDR3, wherein

[0528] the V_{L}-CDR1 comprises an amino acid sequence having at least 60%, at least 70%, at least 80%, at least 90%, or 100% sequence identity to any amino acid sequence according to SEQ ID NOs: 170-220,

[0529] the V_{L}-CDR2 comprises an amino acid sequence having at least 60%, at least 70%, at least 80%, at least 90%, or 100% sequence identity to any amino acid sequence according to SEQ ID NOs: 221-247,

[0530] the V_{L}-CDR3 comprises an amino acid sequence having at least 60%, at least 70%, at least 80%, at least 90%, or 100% sequence identity to any amino acid sequence according to SEQ ID NOs: 248-296,

[0531] the V_{H}-CDR1 comprises an amino acid sequence having at least 60%, at least 70%, at least 80%, at least 90%, or 100% sequence identity to any amino acid sequence according to SEQ ID NOs: 27-70,

[0532] the V_{H}-CDR2 comprises an amino acid sequence having at least 60%, at least 70%, at least 80%, at least 90%, or 100% sequence identity to any amino acid sequence according to SEQ ID NOs: 71-111, 826, and

[0533] the V_{H}-CDR3 comprises an amino acid sequence having at least 60%, at least 70%, at least 80%, at least 90%, or 100% sequence identity to any amino acid sequence according to SEQ ID NOs: 112-169, 827.

[0534] 92. The use of any one of arrangements 76-91, wherein the anti-Gal3 antibody or binding fragment comprises a combination of a V_{L}-CDR1, a V_{L}-CDR2, a V_{L}-CDR3, a V_{H}-CDR1, a V_{H}-CDR2, and a V_{H}-CDR3 as illustrated in FIG. 14.

[0535] 93. The use of arrangement 91 or 92, wherein the light chain variable region comprises a sequence having at least 80%, 81%, 82%, 83%, 84%, 85%, 86%, 87%, 88%, 89%, 90%, 91%, 92%, 93%, 94%, 95%, 96%, 97%, 98%, or 99% identity to the sequence selected from SEQ ID NOs: 374-447, 823-825.

[0536] 94. The use of any one of arrangements 91-93, wherein the light chain variable region comprises the sequence selected from SEQ ID NOs: 374-447, 823-825.

[0537] 95. The use of any one of arrangements 91-94, wherein the heavy chain variable region comprises a sequence having at least 80%, 81%, 82%, 83%, 84%, 85%, 86%, 87%, 88%, 89%, 90%, 91%, 92%, 93%, 94%, 95%, 96%, 97%, 98%, or 99% identity to the sequence selected from SEQ ID NOs: 297-373, 822, 828.

[0538] 96. The use of any one of arrangements 91-95, wherein the heavy chain variable region comprises the sequence selected from SEQ ID NOs: 297-373, 822, 828.

[0539] 97. The use of any one of arrangements 91-96, wherein the anti-Gal3 antibody or binding fragment thereof comprises a light chain, wherein the light chain comprises a sequence having at least 80%, 81%, 82%, 83%, 84%, 85%, 86%, 87%, 88%, 89%, 90%, 91%, 92%, 93%, 94%, 95%, 96%, 97%, 98%, or 99% identity to the sequence selected from SEQ ID NOs: 495-538, 830.

[0540] 98. The use of arrangement 97, wherein the light chain comprises the sequence selected from SEQ ID NOs: 495-538, 830.

[0541] 99. The use of any one of arrangements 91-98, wherein the anti-Gal3 antibody or binding fragment thereof comprises a heavy chain, wherein the heavy chain comprises a sequence having at least 80%, 81%, 82%, 83%, 84%, 85%, 86%, 87%, 88%, 89%, 90%, 91%, 92%, 93%, 94%, 95%, 96%, 97%, 98%, or 99% identity to the sequence selected from SEQ ID NOs: 448-494, 829.

[0542] 100. The use of arrangement 99, wherein the heavy chain comprises the sequence selected from SEQ ID NOs: 448-494, 829.

[0543] 101. The use of any one of arrangements 76-100, wherein the anti-Gal3 antibody or binding fragment thereof is selected from the group consisting of: TB001, TB006, 12G5.D7, 13A12.2E5, 14H10.2C9, 15F10.2D6, 19B5.2E6, 20D11.2C6, 20H5.A3, 23H9.2E4, 2D10.2B2, 3B11.2G2, 7D8.2D8, mIMT001, 4A11.2B5, 4A11.H1L1, 4A11.H4L2, 4G2.2G6, 6B3.2D3, 6H6.2D6, 9H2.2H10, 13G4.2F8, 13H12.2F8, 15G7.2A7, 19D9.2E5, 23B10.2B12, 24D12.2H9, F846C.1B2, F846C.1F5, F846C.1H12, F846C.1H5, F846C.2H3, F846TC.14A2, F846TC.14E4, F846TC.16B5, F846TC.7F10, F847C.10B9, F847C.11B1, F847C.12F12, F847C.26F5, F847C.4B10, F849C.8D10, F849C.8H3, 846.2B11, 846.4D5, 846T.1H2, 847.14H4, 846.2D4, 846.2F11, 846T.10B1, 846T.2E3, 846T.4C9, 846T.4E11, 846T.4F5, 846T.8D1, 847.10C9, 847.11D6, 847.15D12, 847.15F9, 847.15H11, 847.20H7, 847.21B11, 847.27B9, 847.28D1, 847.2B8, 847.3B3, 849.1D2, 849.2D7, 849.2F12, 849.4B2, 849.4F12, 849.4F2, 849.5C2, 849.8D12, F847C.21H6, 849.5H1, 847.23F11, 847.16D10, 847.13E2-mH0mL1, 847.13E2-mH0mL2, 847.12C4, 847.4D3, 2D10-VH0-VL0, or binding fragment thereof.

[0544] 102. A method of treating a disorder, the method comprising:

[0545] administering to a subject an effective amount of an anti-Gal3 antibody or binding fragment thereof, wherein the disorder is selected from at least one of: bacterial infection, viral infection, fungal infection, protozoan infection, graft-versus-host disease, cytomegalovirus, Epstein-Barr virus, hemophagocytic lymphohistiocystosis (HLH), Epstein-Barr virus-associated HLH, sporadic HLH, macrophage activation syndrome (MAS), chronic arthritis, systemic Juvenile idiopathic Arthritis (sJIA), Still's Disease, Cryopyrin-associated Periodic Syndrome (CAPS), Familial Cold Auto-inflammatory Syndrome (FCAS), Familial Cold Urticaria (FCU), Muckle-Well Syndrome (MWS), Chronic Infantile Neurological Cutaneous and Articular (CINCA) Syndrome, cryopyrinopathy comprising inherited or de novo gain of function mutations in the NLRP3 gene, a hereditary auto-inflammatory disorder, acute pancreatitis, severe burns, trauma, acute respiratory distress syndrome (ARDS), Streptococcus, Pseudomonas, influenza, bird flu, H5N1, H1N1, variola virus, coronavirus, severe acute respiratory syndrome (SARS), SARS-CoV-1, SARS-CoV-2, sepsis, gram-negative sepsis, Gram-positive toxins, malaria, Ebola virus, variola virus, systemic Gram-negative bacterial infection, bacteremia, Jarisch-Herxheimer syndrome, glycosylphosphatidylinositol (GPI), or lipopolysaccharide, or treatment with an immunotherapy comprising rituximab, obinutuzumab, alemtuzumab, brentuximab, dacetuzumab, nivolumab, theralizumab, oxaliplatin, lenalidomide, T-cell engager molecules, bi-specific T-cell engager (BiTE) molecules, or CAR T therapy.

[0546] 103. A pharmaceutical antibody formulation comprising:

[0547] a therapeutically effective amount of the antibody of any one of arrangements 1-11;

[0548] histidine;

[0549] methionine;

[0550] NaCl; and

[0551] polysorbate, wherein the formulation is at a pH between 5.3 and 6.3.

[0552] 104. The pharmaceutical antibody formulation of arrangement 103, wherein the antibody comprises a V_{H}-CDR1 having the sequence of SEQ ID NO: 31, a V_{H}-CDR2 having the sequence of SEQ ID NO: 72, a V_{H}-CDR3 having the sequence of SEQ ID NO: 113, a V_{L}-CDR1 having the sequence of SEQ ID NO: 171, a V_{L}-CDR2 having the sequence of SEQ ID NO: 222; and a V_{L}-CDR3 having the sequence of SEQ ID NO: 249.

[0553] 105. The pharmaceutical antibody formulation of arrangement 103 or 104, wherein the histidine is L-histidine.

[0554] 106. The pharmaceutical antibody formulation of arrangement 105, wherein the L-histidine is present at 10 to 50 mM.

[0555] 107. The pharmaceutical antibody formulation of arrangement 105 or 106, wherein the L-histidine is present at about 20 mM.

[0556] 108. The pharmaceutical antibody formulation of any one of arrangements 103-107, wherein the methionine is present at 2 to 10 mM.

[0557] 109. The pharmaceutical antibody formulation of any one of arrangements 103-108, wherein the methionine is present at 5 mM.

[0558] 110. The pharmaceutical antibody formulation of any one of arrangements 103-109, wherein the NaCl is present at 50 to 150 mM.

[0559] 111. The pharmaceutical antibody formulation of any one of arrangements 103-110, wherein the NaCl is present at 100 mM.

[0560] 112. The pharmaceutical antibody formulation of any one of arrangements 103-111, wherein the polysorbate comprises polysorbate-20, polysorbate-40, polysorbate-60, polysorbate-80, or any combination thereof.

[0561] 113. The pharmaceutical antibody formulation of any one of arrangements 103-112, wherein the polysorbate comprises polysorbate-80.

[0562] 114. The pharmaceutical antibody formulation of arrangement 113, wherein the polysorbate 80 is present at 0.01 to 0.04% or about 0.01% to about 0.04%.

[0563] 115. The pharmaceutical antibody formulation of arrangement 114, wherein the polysorbate 80 is present at 0.02% or about 0.02%.

[0564] 116. The pharmaceutical antibody formulation of any one of arrangements 103-115, wherein the pH is about 5.8.

[0565] 117. The pharmaceutical antibody formulation of any one of arrangements 103-116, wherein the pH is 5.8.

[0566] 118. The pharmaceutical antibody formulation of any one of arrangements 103-117, further comprising sucrose, mannitol, or both.

[0567] 119. The pharmaceutical antibody formulation of arrangement 118, wherein the sucrose is present at 2% to 5% or about 2% to about 5%.

[0568] 120. The pharmaceutical antibody formulation of arrangement 118 or 119, wherein mannitol is present at 2% to 5% or about 2% to about 5%.

[0569] 121. The pharmaceutical antibody formulation of any one of arrangements 103-120, wherein the antibody is present at an amount of 1 to 50 mg as a unit dose.

[0570] 122. The pharmaceutical antibody formulation of any one of arrangements 103-121, wherein the antibody is present at an amount of one of: 1 mg, 5 mg, 10 mg, 20 mg, 40 mg, or 50 mg as a unit dose, or any amount within a range defined by any two of the aforementioned amounts.

[0571] 123. The pharmaceutical antibody formulation of any one of arrangements 103-122, wherein the antibody is present at a concentration of one of: 1 mg/mL, 5 mg/mL, 10 mg/mL, 20 mg/mL, 40 mg/mL, or 50 mg/mL, or any concentration within a range defined by any two of the aforementioned concentrations.

[0572] 124. The pharmaceutical antibody formulation of any one of arrangements 103-123, wherein L-histidine is present at about 20 mM, methionine is present at about 5 mM, NaCl is present at about 100 mM, polysorbate 80 is present at about 0.02%, sucrose is present at 2-5%, mannitol is present at 2-5%, the pH is about 5.8, and wherein the therapeutically effective amount of the antibody is one of: 1 mg, 5 mg, 10 mg, 20 mg, 40 mg, or 50 mg as a unit dose, or any amount within a range defined by any two of the aforementioned amounts.

[0573] 125. A pharmaceutical antibody formulation comprising:

[0574] a therapeutically effective amount of an antibody,

[0575] wherein the antibody comprises a V_{H}-CDR1 having the sequence of SEQ ID NO: 31, a V_{H}-CDR2 having the sequence of SEQ ID NO: 72, a V_{H}-CDR3 having the sequence of SEQ ID NO: 113, a V_{L}-CDR1 having the sequence of SEQ ID NO: 171, a V_{L}-CDR2 having the sequence of SEQ ID NO: 222; and a V_{L}-CDR3 having the sequence of SEQ ID NO: 249, and wherein the antibody is present at an amount as a unit dose of: 1 mg, 5 mg, 10 mg, 20 mg, 40 mg, or 50 mg;

[0576] L-histidine is present at 20 mM;

[0577] methionine is present at 5 mM;

[0578] NaCl is present at 100 mM;

[0579] polysorbate 80 is present at 0.02%; and

[0580] the pH is about 5.8.

[0581] 126. The pharmaceutical antibody formulation of any one of arrangements 103-125, wherein sucrose is present at 2-5% and mannitol is present at 2-5%.

[0582] 127. The pharmaceutical antibody formulation of any one of arrangements 103-126, wherein the formulation is configured for parenteral administration.

[0583] 128. The pharmaceutical antibody formulation of any one of arrangements 103-127, wherein the formulation is configured for subcutaneous administration.

[0584] 129. The pharmaceutical antibody formulation of arrangement 128, wherein the formulation configured for subcutaneous administration comprises sucrose or mannitol, or both.

[0585] 130. The pharmaceutical antibody formulation of any one of arrangements 103-127, wherein the formulation is configured for intravenous administration.

[0586] 131. The pharmaceutical antibody formulation of arrangement 130, wherein the formulation configured for intravenous administration does not comprise sucrose or mannitol, or both.

[0587] 132. The pharmaceutical antibody formulation of any one of arrangements 103-131, wherein the pharmaceutical antibody formulation is prepared at a concentration of antibody of 20 mg/mL or 50 mg/mL.

[0588] 133. The pharmaceutical antibody formulation of any one of arrangements 103-132, wherein the pharmaceutical antibody formulation remains 60% stable over 3 months at either 5° C. or 25° C./60% relative humidity (RH).

[0589] 134. A sterile vial comprising a pharmaceutical antibody formulation, wherein the pharmaceutical antibody formulation comprises a therapeutically effective amount of an antibody, wherein the antibody comprises a V_{H}-CDR1 having the sequence of SEQ ID NO: 31, a V_{H}-CDR2 having the sequence of SEQ ID NO: 72, a V_{H}-CDR3 having the sequence of SEQ ID NO: 113, a V_{L}-CDR1 having the sequence of SEQ ID NO: 171, a V_{L}-CDR2 having the sequence of SEQ ID NO: 222; and a V_{L}-CDR3 having the sequence of SEQ ID NO: 249.

[0590] 135. The sterile vial of arrangement 134, wherein the pharmaceutical antibody formation further comprises histidine, methionine, NaCl, and polysorbate, and wherein the formulation is at a pH between 5.3 and 6.3.

[0591] 136. The sterile vial of arrangement 134 or 135, wherein the sterile vial is a 5 mL or 10 mL sterile vial.

[0592] 137. The sterile vial of any one of arrangements 134-136, wherein the sterile vial contains 2, 3, 4, 5, 6, 7, 8, 9, or 10 mL of the pharmaceutical antibody formulation.

[0593] 138. The sterile vial of any one of arrangements 134-137, wherein the sterile vial contains 2 mL or at least 2 mL of the pharmaceutical antibody formulation.

[0594] 139. The sterile vial of any one of arrangements 134-137, wherein the sterile vial contains 8 mL or at least 8 mL of the pharmaceutical antibody formulation.

[0595] 140. The sterile vial of any one of arrangements 134-139, wherein the pharmaceutical antibody formulation is a concentrated form of the pharmaceutical antibody formulation of any one of arrangements 103-133.

[0596] 141. The sterile vial of arrangement 140, wherein the concentrated form of the pharmaceutical antibody formulation is at a concentration of 20, 30, 40, 50, 60, 70, 80, 90, or 100 mg/mL of antibody, or any concentration within a range defined by any two of the aforementioned concentrations.

[0597] 142. The sterile vial of arrangement 140 or 141, wherein the concentrated form of the pharmaceutical antibody formulation is at a concentration of 20 mg/mL or at least 20 mg/mL of antibody.

[0598] 143. The sterile vial of any one of arrangements 140-142, wherein the concentrated form of the pharmaceutical antibody formulation is at a concentration of 50 mg/mL or at least 50 mg/mL of antibody.

[0599] 144. The sterile vial of any one of arrangements 140-143, wherein the concentrated form of the pharmaceutical antibody formulation is intended to be diluted 1×, 2×, 3×, 4×, 5×, 6×, 7×, 8×, 9×, 10×, 11×, 12×, 13×, 14×, 15×, 16×, 17×, 18×, 19×, 20×, 30×, 40×, 50×, 60×, 70×, 80×, 90×, or 100× fold, or any fold within a range defined by any two of the aforementioned fold.

[0600] 145. The sterile vial of any one of arrangements 140-144, wherein the concentrated form of the pharmaceutical antibody formulation is intended to be diluted to 0.1, 0.2, 0.3, 0.4, 0.5, 0.6, 0.7, 0.8, 0.9, 1, 2, 3, 4, 5, 6, 7, 8, 9, 10, 11, 12, 13, 14, 15, 16, 17, 18, 19, or 20 mg/mL or any concentration within a range defined by any two of the aforementioned concentrations.

[0601] 146. The sterile vial of any one of arrangements 140-145, wherein the concentrated form of the pharmaceutical antibody formulation is intended to be diluted into a final volume of 200, 210, 220, 230, 240, 250, 260, 270, 280, 290, 300, 310, 320, 330, 340, 350, 360, 370, 380, 390, 400, 410, 420, 430, 440, 450, 460, 470, 480, 490, 500, 510, 520, 530, 540, 550, 560, 570, 580, 590, or 600 mL.

[0602] 147. The sterile vial of any one of arrangements 140-146, wherein the concentrated form of the pharmaceutical antibody formulation is intended to be diluted with saline.

[0603] 148. The sterile vial of any one of arrangements 140-147, wherein the pharmaceutical antibody formulation is configured for parenteral administration.

[0604] 149. The sterile vial of any one of arrangements 140-148, wherein the pharmaceutical antibody formulation is configured for subcutaneous administration.

[0605] 150. The sterile vial of arrangement 149, wherein the pharmaceutical antibody formulation configured for subcutaneous administration comprises sucrose or mannitol, or both.

[0606] 151. The sterile vial of any one of arrangements 140-148, wherein the pharmaceutical antibody formulation is configured for intravenous administration.

[0607] 152. The sterile vial of arrangement 151, wherein the pharmaceutical antibody formulation configured for intravenous administration does not comprise sucrose or mannitol, or both.

[0608] 153. The sterile vial of any one of arrangements 134-152, wherein the pharmaceutical antibody formulation remains 60% stable over 3 months at either 5° C. or 25° C./60% relative humidity (RH).

[0609] 154. The pharmaceutical antibody formulation of any one of the preceding pharmaceutical antibody formulation arrangements or sterile vial arrangements, wherein the antibody comprises a heavy chain variable domain (VH) region having a sequence at least 80%, 85%, 90%, 95%, 99%, or 100% identical to that of SEQ ID NO: 298.

[0610] 155. The pharmaceutical antibody formulation of any one of the preceding pharmaceutical antibody formulation arrangements or sterile vial arrangements, wherein the antibody comprises a light chain variable domain (VL) region having a sequence at least 80%, 85%, 90%, 95%, 99%, or 100% identical to that of SEQ ID NO: 375.

[0611] 156. The pharmaceutical antibody formulation of any one of the preceding pharmaceutical antibody formulation arrangements or sterile vial arrangements, wherein the antibody comprises a VH region having a sequence at least 80%, 85%, 90%, 95%, 99%, or 100% identical to that of SEQ ID NO: 298, and wherein the antibody comprises a VL region having a sequence at least 80%, 85%, 90%, 95%, 99%, or 100% identical to that of SEQ ID NO: 375.

[0612] 157. The pharmaceutical antibody formulation of any one of the preceding pharmaceutical antibody formulation arrangements or sterile vial arrangements, wherein the antibody comprises a VH region having a sequence of SEQ ID NO: 298.

[0613] 158. The pharmaceutical antibody formulation of any one of the preceding pharmaceutical antibody formulation arrangements or sterile vial arrangements, wherein the antibody comprises a VL region having a sequence of SEQ ID NO: 375.

[0614] 159. The pharmaceutical antibody formulation of any one of the preceding pharmaceutical antibody formulation arrangements or sterile vial arrangements, wherein the antibody comprises a VH region having a sequence of SEQ ID NO: 298, and wherein the antibody comprises a VL region having a sequence of SEQ ID NO: 375.

[0615] 160. The pharmaceutical antibody formulation of any one of the preceding pharmaceutical antibody formulation arrangements or sterile vial arrangements, wherein the antibody comprises a heavy chain (HC) having a sequence at least 80%, 85%, 90%, 95%, 99%, or 100% identical to that of SEQ ID NO: 449.

[0616] 161. The pharmaceutical antibody formulation of any one of the preceding pharmaceutical antibody formulation arrangements or sterile vial arrangements, wherein the antibody comprises a light chain (LC) having a sequence at least 80%, 85%, 90%, 95%, 99%, or 100% identical to that of SEQ ID NO: 496.

[0617] 162. The pharmaceutical antibody formulation of any one of the preceding pharmaceutical antibody formulation arrangements or sterile vial arrangements, wherein the antibody comprises an HC having a sequence of SEQ ID NO: 449.

[0618] 163. The pharmaceutical antibody formulation of any one of the preceding pharmaceutical antibody formulation arrangements or sterile vial arrangements, wherein the antibody comprises an LC having a sequence of SEQ ID NO: 496.

[0619] 164. The pharmaceutical antibody formulation of any one of the preceding pharmaceutical antibody formulation arrangements or sterile vial arrangements, wherein the antibody comprises a VH that is encoded by a nucleic acid sequence having at least 80%, 85%, 90%, 95%, 99%, or 100% identical to that of SEQ ID NO: 540.

[0620] 165. The pharmaceutical antibody formulation of any one of the preceding pharmaceutical antibody formulation arrangements or sterile vial arrangements, wherein the antibody comprises a VL that is encoded by a nucleic acid sequence having at least 80%, 85%, 90%, 95%, 99%, or 100% identical to that of SEQ ID NO: 622.

[0621] 166. The pharmaceutical antibody formulation of any one of the preceding pharmaceutical antibody formulation arrangements or sterile vial arrangements, wherein the antibody comprises a VH that is encoded by a nucleic acid sequence of SEQ ID NO: 540.

[0622] 167. The pharmaceutical antibody formulation of any one of the preceding pharmaceutical antibody formulation arrangements or sterile vial arrangements, wherein the antibody comprises a VL that is encoded by a nucleic acid sequence of SEQ ID NO: 622.

[0623] 168. The pharmaceutical antibody formulation of any one of the preceding pharmaceutical antibody formulation arrangements or sterile vial arrangements, wherein the antibody comprises an HC that is encoded by a nucleic acid sequence having at least 80%, 85%, 90%, 95%, 99%, or 100% identical to that of SEQ ID NO: 704.

[0624] 169. The pharmaceutical antibody formulation of any one of the preceding pharmaceutical antibody formulation arrangements or sterile vial arrangements, wherein the antibody comprises an LC that is encoded by a nucleic acid sequence having at least 80%, 85%, 90%, 95%, 99%, or 100% identical to that of SEQ ID NO: 751.

[0625] 170. The pharmaceutical antibody formulation of any one of the preceding pharmaceutical antibody formulation arrangements or sterile vial arrangements, wherein the antibody comprises an HC that is encoded by a nucleic acid sequence of SEQ ID NO: 704.

[0626] 171. The pharmaceutical antibody formulation of any one of the preceding pharmaceutical antibody formulation arrangements or sterile vial arrangements, wherein the antibody comprises an LC that is encoded by a nucleic acid sequence of SEQ ID NO: 751.

[0627] 172. A method of treating a coronavirus infection, the method comprising:

[0628] administering the pharmaceutical antibody formulation of any one of the preceding pharmaceutical antibody formulation arrangements or sterile vial arrangements to a subject in need of treatment for a coronavirus infection.

[0629] 173. The method of arrangement 172, wherein the pharmaceutical antibody formulation is administered daily, weekly, bi-weekly, or every 10 days.

[0630] 174. The method of arrangement 172 or 173, wherein the subject is administered 1 mg, 5 mg, 10 mg, 20 mg, 40 mg, or 50 mg of antibody as a unit dose, or any amount of antibody as a unit dose within a range defined by any two of the aforementioned amounts.

[0631] 175. The method of any one of arrangements 172-174, wherein the subject is administered a pharmaceutical antibody formulation comprising:

[0632] a therapeutically effective amount of the antibody,

[0633] wherein the antibody comprises a V_{H}-CDR1 having the sequence of SEQ ID NO: 31, a V_{H}-CDR2 having the sequence of SEQ ID NO: 72, a V_{H}-CDR3 having the sequence of SEQ ID NO: 113, a V_{L}-CDR1 having the sequence of SEQ ID NO: 171, a V_{L}-CDR2 having the sequence of SEQ ID NO: 222; and a V_{L}-CDR3 having the sequence of SEQ ID NO: 249, and wherein the antibody is present at an amount as a unit dose of: 1 mg, 5 mg, 10 mg, 20 mg, 40 mg, or 50 mg;

[0634] L-histidine is present at 20 mM;

[0635] methionine is present at 5 mM;

[0636] NaCl is present at 100 mM;

[0637] polysorbate 80 is present at 0.02%; and

[0638] the pH is about 5.8.

[0639] 176. The method of any one of arrangements 172-175, wherein the unit dose is administered over the course of 10, 20, 30, 40, 50, 60, 70, 80, 90, 100, 120, 130, 140, 150, 160, 170, 180, 190, or 200 minutes.

[0640] 177. The method of any one of arrangements 172-176, wherein the unit dose is administered over the course of 60 minutes.

[0641] 178. The method of one of arrangements 172-177, further comprising a step of identifying a subject in need of treatment for a coronavirus infection.

[0642] 179. The method of arrangement 178, wherein the step of identifying the subject in need of treatment for a coronavirus infection comprises one or more of identifying a positive coronavirus infection by PCR test or equivalent test, identifying the subject as having symptoms of fever, cough, sore throat, malaise, headache, muscle pain, gastrointestinal symptoms, shortness of breath with excursion, respiratory rate ≥20 breaths per minute, saturation of oxygen (SpO2)>93% on room air at sea level, heart rate ≥90 beats per minute, diabetes, hypertension, cancer, chronic kidney disease, body mass index (BMI)≥35, ≥65 years of age, cardiovascular disease such as hypertension, chronic obstructive pulmonary disease or other chronic respiratory disease.

[0643] 180. The method of one of arrangements 172-179, wherein the treating step is to a patient that already has symptoms of the coronavirus infection.

[0644] 181. The method of one of arrangements 172-180, wherein the treating step is prophylactic.

[0645] 182. The method of any one of arrangements 172-181, wherein the coronavirus infection is a SARS-CoV, MERS-CoV, or SARS-CoV-2 infection.

[0646] 183. The method of any one of arrangements 172-182, wherein the pharmaceutical antibody formulation is administered for 10-18 months.

[0647] 184. The method of any one of arrangements 172-183, wherein the pharmaceutical antibody formulation is administered intravenously.

[0648] 185. The method of any one of arrangements 172-184, wherein the pharmaceutical antibody formulation is administered subcutaneously.

[0649] 186. A pharmaceutical antibody formulation comprising:

[0650] a therapeutically effective amount of an antibody, wherein the antibody comprises a V_{H}-CDR1 having the sequence of SEQ ID NO: 31, a V_{H}-CDR2 having the sequence of SEQ ID NO: 72, a V_{H}-CDR3 having the sequence of SEQ ID NO: 113, a V_{L}-CDR1 having the sequence of SEQ ID NO: 171, a V_{L}-CDR2 having the sequence of SEQ ID NO: 222; and a V_{L}-CDR3 having the sequence of SEQ ID NO: 249, wherein each CDR can have up to 1, 2, 3, 4, or 5 amino acids changed from the recited sequence;

[0651] histidine;

[0652] methionine;

[0653] NaCl; and

[0654] polysorbate, wherein the formulation is at a pH between 5.3 and 6.3.

[0655] 187. The pharmaceutical antibody formulation of arrangement 186, further comprising sucrose or mannitol, or both.

[0656] 188. The pharmaceutical antibody formulation of arrangement 186 or 187, wherein the antibody is present at an amount as a unit dose of: 1 mg, 5 mg, 10 mg, 20 mg, 40 mg, or 50 mg.

[0657] 189. A method of treating a coronavirus infection, the method comprising:

[0658] administering a pharmaceutical antibody formulation to a subject in need of treatment for a coronavirus infection,

[0659] wherein the pharmaceutical antibody formulation comprises a therapeutically effective amount of an antibody, wherein the antibody comprises a V_{H}-CDR1 having the sequence of SEQ ID NO: 31, a V_{H}-CDR2 having the sequence of SEQ ID NO: 72, a V_{H}-CDR3 having the sequence of SEQ ID NO: 113, a V_{L}-CDR1 having the sequence of SEQ ID NO: 171, a V_{L}-CDR2 having the sequence of SEQ ID NO: 222; and a V_{L}-CDR3 having the sequence of SEQ ID NO: 249;

[0660] histidine;

[0661] methionine;

[0662] NaCl; and

[0663] polysorbate, wherein the formulation is at a pH between 5.3 and 6.3.

[0664] 190. A method of decreasing or inhibiting inflammation in a subject in need thereof, the method comprising:

[0665] administering a pharmaceutical antibody formulation to the subject in need thereof,

[0666] wherein the pharmaceutical antibody formulation comprises a therapeutically effective amount of an antibody, wherein the antibody comprises a V_{H}-CDR1 having the sequence of SEQ ID NO: 31, a V_{H}-CDR2 having the sequence of SEQ ID NO: 72, a V_{H}-CDR3 having the sequence of SEQ ID NO: 113, a V_{L}-CDR1 having the sequence of SEQ ID NO: 171, a V_{L}-CDR2 having the sequence of SEQ ID NO: 222; and a V_{L}-CDR3 having the sequence of SEQ ID NO: 249;

[0667] histidine;

[0668] methionine;

[0669] NaCl; and

[0670] polysorbate, wherein the formulation is at a pH between 5.3 and 6.3.

### EXAMPLES

[0671] Some aspects of the embodiments discussed above are disclosed in further detail in the following examples, which are not in any way intended to limit the scope of the present disclosure. Those in the art will appreciate that many other embodiments also fall within the scope of the invention, as it is described herein above and in the claims.

### Example 1. Evaluation of Gal3 mRNA Expression in COVID-19 (SARS-CoV-2 Patient Samples

[0672] To evaluate the relative Gal3 mRNA levels in PBMCs collected from blood of SARS-CoV-2-infected patients, reported Gal3 mRNA (LGALS3) expression by RNA sequencing was extracted from Xiong Y., et al. Transcriptomic characteristics of bronchoalveolar lavage fluid and peripheral blood mononuclear cells in COVID-19 patients. Emerging Microbes & Infections, 2020; 9(1):761-770, hereby incorporated by reference in its entirety. Data from three normal donors and three SARS-CoV-2 patients was evaluated. The extracted data are reproduced in Table 1 below. FIG. 1 shows a graphical representation of this relative Gal3 mRNA expression data as generated employing R software (available on the world wide web at r-project.org).

TABLE 1
Gal3 expression profile in COVID-19 patients

| | Counts per | | Counts per |
|---|---|---|---|
| | million | COVID-19 | million |
| Healthy Controls | (CPM) | Patients | (CPM) |
| Individual 1 | 54.95 | Individual 1 | 108.12 |
| Individual 2 | 64.85 | Individual 2 | 179.4 |
| Individual 3 | 53.94 | Individual 3 | 150.39 |
| Average CPM | 57.91 | Average CPM | 145.97 |
| Log2 Fold Change | 1.54 | | |
| p-value | 4.26 × 10⁻⁴ | | |

### Example 2. Assessment of Gal3 Binding to Coronavirus Host Entry Receptor Proteins

[0673] To evaluate the possibility that Gal3 could physically interact with human receptors mediating coronavirus entry into host cells, such as angiotensin-converting enzyme 2 (ACE2) and CD147 (EMMPRIN, basigin), ELISA assessments using purified Gal3 and purified ACE2 and CD147 were conducted.

[0674] Briefly, human Gal3 protein (R&D Systems, 8259-GA; R&D Systems, 1154-GA/CF; or Acro Biosystems, GA3-H5129) was diluted in PBS (Corning, 21-030-CM) to a concentration of 4, 2, or 1 μg/ml and added to the wells of a 96-well ELISA plate (Thermo Fisher, 44-2404-21). After incubating the plate at 4° C. overnight, the plate was washed three times with PBST (PBS with 0.05% Tween 20 [VWR, 0777]). The plate was then blocked for an hour with 2% BSA (EMD Millipore, 126609) in PBST at room temperature with gentle rocking. Thereafter, the 2% BSA in PBST was discarded and 4, 2, or 1 μg/ml of recombinant host entry receptor proteins in 2% BSA in PBST were added to the wells. The host entry receptor proteins used include recombinant human ACE2 (hACE2; LifeSpan Biosciences, LS-G97114-10, hIgG1 Fc-tagged; or Acro Biosystems, AC2-H82F9, biotinylated) and CD147 (hCD147; R&D Systems, 972-EMN, 6×His-tagged). The plate was incubated for an hour at room temperature with gentle rocking. Thereafter, the plate was washed three times with PBST. Peroxidase AffiniPure F(ab′)2 Fragment Goat Anti-Human IgG (H+L) polyclonal antibody (Jackson ImmunoResearch, 109-036-003; 1:4000 dilution; detects ACE2 from LifeSpan Biosciences), Avidin HRP (Biolegend, 405103; 1:2000 dilution, detects ACE2 from Acro Biosystems), or goat anti-6×His HRP antibody (Abcam, ab1269; 1:3000 dilution, detects CD147) was diluted in 2% BSA in PBST and added to the wells. The plate was incubated at room temperature for an hour with gentle rocking and then washed three times with PBST. TMB substrate (Thermo Scientific, 34029) was then added to each well. The reaction was stopped with 1M HCl (JT Baker, 5620-02) and read using a plate reader (Molecular Devices) at absorbance of 450 nm.

[0675] As depicted in FIG. 2 and FIG. 3, no significant binding of the ACE2 or CD147 was observed to plates without Gal3 coating. In contrast, both host entry receptors strongly bound Gal3-coated wells. To ensure reproducibility of this observation, human Gal3 from different vendors was tested.

### Example 3. Assessment of Gal3 Binding to Coronavirus Spike Protein

[0676] To evaluate the possibility that human Gal3 could physically interact with SARS-CoV-2 spike protein (S protein), which mediates coronavirus entry into host cells, ELISA assessment with purified Gal3 and SARS-CoV-2 S protein was conducted. Briefly, human Gal3 protein (R&D Systems, 1154-GA/CF or Acro Biosystems, GA3-H5129) was diluted in PBS (Corning, 21-030-CM) to a concentration of 4, 2, or 1 μg/ml and added to the wells of a 96-well ELISA plate (Thermo Fisher, 44-2404-21). After incubating the plate at 4° C. overnight, the plate was washed three times with PBST (PBS with 0.05% Tween 20 [VWR, 0777]). The plate was then blocked for an hour with 2% BSA (EMD Millipore, 126609) in PBST at room temperature with gentle rocking. During blocking, SARS-CoV-2 S protein (Acro Biosystems, SPN-052H4) was biotinylated with EZ Link Sulfo-NHS-LC-Biotin (ThermoFisher Scientific, A39257), following manufacturer's instructions. After biotinylation, the protein was desalted using a Zeba Spin Desalting Column (ThermoFisher Scientific, 89882), following manufacturer's instructions. Thereafter, the 2% BSA in PBST was discarded and 4, 2, or 1 μg/ml of non-biotinylated or biotinylated recombinant SARS-CoV-2 S protein in 2% BSA in PBST was added to the wells. The plate was incubated for an hour at room temperature with gentle rocking. Thereafter, the plate was washed three times with PBST. Anti-6×His HRP antibody (Abcam, ab1269; 1:3000 dilution) or Avidin HRP (Biolegend, 405103; 1:2000 dilution) was diluted in 2% BSA in PBST and then added to the wells. The plate was incubated at room temperature for an hour with gentle rocking and then washed three times with PBST. TMB substrate (Thermo Scientific, 34029) was then added to each well. The reaction was stopped with 1M HCl (JT Baker, 5620-02) and read using a plate reader (Molecular Devices) at absorbance of 450 nm.

[0677] As depicted in FIG. 4, no significant binding of the SARS-CoV-2 S protein was observed to plates without Gal3 coating. In contrast, SARS-CoV-2 S protein strongly bound Gal3-coated wells.

### Example 4. Anti-Gal3 Antibodies Targeted to the N-Terminal Domain or TRD Blocks Binding of Gal3 to Coronavirus Host Entry Receptors

[0678] To identify Gal3-binding antibodies with the capacity to block the assembly of Gal3 with human receptors mediating coronavirus entry into host cells, purified Gal3 and human ACE2 (hACE2) were incubated in the presence of a panel of Gal3-targeted monoclonal antibodies, with non-specific control antibodies, or without antibody, and protein interaction was evaluated by ELISA. Briefly, human Gal3 protein (Acro Biosystems, GA3-H5129) was diluted in PBS to a concentration of 1.5 μg/ml and added to the wells of a 96-well ELISA plate. After incubating the plate at 4° C. overnight, the plate was washed three times with PBST. The plate was then blocked for an hour with 2% BSA in PBST at room temperature with gentle rocking. Thereafter, the 2% BSA in PBST was discarded and 30 μl of control or anti-Gal3 antibodies at 20 ug/ml were added to each well, followed by the addition of 30 μl of 3 μg/ml of biotinylated host entry receptor hACE2 (Acro Biosystems, AC2-H82F9). The plate was incubated for an hour at room temperature with gentle rocking. Thereafter, the plate was washed three times with PBST. Avidin HRP (Biolegend, 405103) was then added to the wells at 1:2000 dilution in 2% BSA in PBST. The plate was incubated at room temperature for an hour with gentle rocking and then washed three times with PBST. TMB substrate was then added to each well. The reaction was stopped with 1M HCl and read using a plate reader at absorbance of 450 nm.

[0679] As depicted in FIG. 5A, antibodies targeted to the N-terminal domain or TRD of Gal3 exhibited a range of inhibitory activity against the binding of Gal3 to the host entry receptor protein ACE2. Several antibody clones, 2D10.2B2, 6H6.2D6, murine IMT1 (mIMT1, mIMT001), and human IMT1 (hIMT1, IMT001) displayed over 95% blocking of GALS assembly with ACE2. In contract, 24D12.2H9 antibody demonstrated only 55% of blocking activity. The rest of the tested antibodies (13A12.2E5, 3B11.2G2, 13H12.2F8, 23H9.2E4, 4A11.2B5, 19B5.2E6, 15G7.2A7, 4G2.2G6, 20D11.2C6, human IMT6 (IMT006, IMT006a)) displayed between 75-90% of blocking of GAL3 assembly with ACE2. Collectively, these observations reveal that Gal3-targeted antibodies exist with varying ability in interfering with the association of Gal3 with the host entry receptor ACE2.

### Example 5. Anti-Gal3 Antibodies Targeted to the N-Terminal Domain or TRD Blocks Binding of Gal3 to Coronavirus Spike Protein

[0680] To identify Gal3-binding antibodies with the capacity to block the assembly of Gal3 with SARS-CoV-2 spike protein (S protein), purified Gal3 and SARS-CoV-2 S protein were incubated in the presence of a panel of Gal3-targeted monoclonal antibodies, with non-specific control antibodies, or without antibody, and protein interaction was evaluated by ELISA.

[0681] Human Galectin-3 protein (Immutics, HEK293 6his-EK-hGal3 E1) was diluted in PBS to a concentration of 4 μg/ml and 40 μl was added to the wells of an ELISA plate. After incubating the plate at 4° C. overnight, the plate was washed three times with 300 μl PBST (PBS with 0.05% Tween 20). The plate was then blocked for an hour with 150 μl 2% BSA in PBST at room temperature with gentle rocking. SARS-CoV-2 spike RBD (GenScript, Z03483-1, P50172004) was biotinylated with EZ-Link Sulfo-NHS-LC-Biotin (ThermoFisher Scientific, A39257) following the manufacturer's instructions and desalted using Zeba Spin Desalting Columns (ThermoFisher Scientific, 89882) following the manufacturer's instructions. Thereafter, the 2% BSA in PBST was discarded and 30 μl of antibody (20 μg/ml) in 2% BSA in PBST in duplicate was added to the wells. Immediately afterwards, 30 μl of biotinylated SARS-CoV-2 spike RBD (2 μg/ml) in 2% BSA in PBST was added to the antibody in the wells. The plate was incubated for an hour at room temperature with gentle rocking. Thereafter, the plate was washed three times with 300 μl PBST. Avidin HRP (1:2000) was diluted in 2% BSA in PBST and then 30 μl added to the wells. The plate was incubated at room temperature for an hour with gentle rocking and then washed three times with 300 μl PBST. TMB substrate (50 μl) (Thermo Scientific, 34029, UJ2859151) was then added to each well. The reaction was stopped with 1N HCl (25 μl) and read using a plate reader at absorbance of 450 nm.

[0682] As depicted in FIG. 5B, antibodies targeted to the N-terminal domain or TRD of Gal3 exhibited a range of inhibitory activity against the binding of Gal3 to SARS-CoV-2 spike protein. Antibody 2D10.2B2, 6H6.2D6 completely inhibited GAL3 assembly with coronavirus spike protein. The majority of the tested antibodies (13A12.2E5, 3B11.2G2, 13H12.2F8, 23H9.2E4, 4A11.2B5, 19B5.2E6, 20D11.2C6, 14H10.2C9, human IMT6 (IMT006, IMT006a), murine IMT1 (mIMT1, mIMT001), and human IMT1 (hIMT1, IMT001) displayed at least 90% of blocking of GAL3 assembly with coronavirus spike protein. In contract, 24D12.2H9 and 7D8.2D8 antibody did not block GAL3 interaction with SARS-CoV-2 spike protein. Additional antibody clones (12G5.D7 and 9H2.2H10) displayed 45-75% of blocking activity. Collectively, these observations reveal that Gal3-targeted antibodies exist with varying ability in interfering with the association of Gal3 with coronavirus spike protein.

### Example 6. Anti-Gal3 Antibodies Targeted to the N-Terminal Domain or TRD Reduces Coronavirus Load In Vivo

[0683] Patients present with an active SARS-CoV-2 infection. One or more anti-Gal3 antibodies or binding fragments thereof are administered to the patients enterally, orally, intranasally, parenterally, subcutaneously, intramuscularly, intradermally, or intravenously.

[0684] The anti-Gal3 antibodies or binding fragments thereof are administered as doses at an amount of 1 ng as a unit dose (or in the alternative, an amount of 10, 100, 1000 ng, or 1, 10, 50, 100, 200, 300, 400, 500, 600, 700, 800, 900, 1000 μg, or 1, 10, 100, 200, 300, 400, 500, 600, 700, 800, 900, 1000 mg as a unit dose, or any amount within a range defined by any two of the aforementioned amounts, or any other amount appropriate for optimal efficacy in humans). The doses are administered every 1 day (or in the alternative, every 2, 3, 4, 5, 6, 7, 8, 9, 10, 11, 12, 24, 36, or 48 days or weeks or any time within a range defined by any two of the aforementioned times).

[0685] A reduction in viral load or viral count in a nasal swab sample, saliva sample, or bronchoalveolar lavage sample is observed in the patients following administration of the anti-Gal3 antibodies or binding fragments thereof.

[0686] Administration of the anti-Gal3 antibodies or binding fragments may be performed in conjunction with another antiviral or anti-inflammatory therapy. Potential antiviral or anti-inflammatory therapeutics may include but are not limited to chloroquine, hydroxychloroquine, favipiravir, favilavir, remdesivir, tocilizumab, baricitinib, acalabrutinib, galidesivir, sarilumab, lopinavir, ritonavir, darunavir, ribavirin, dexamethasone, ciclesonide, convalescent plasma, interferon-α, pegylated interferon-α, or interferon alfa-2b, or any combination thereof. Patients will be monitored for side effects such as dizziness, nausea, diarrhea, depression, insomnia, headaches, itching, rashes, fevers, or other known side effects of the provided antiviral therapeutics.

### Example 7. Anti-Gal3 Antibodies Targeted to the N-Terminal Domain or TRD Reduces Pulmonary Fibrosis Caused by a Prior SARS-CoV-2 Infection

[0687] Patients present with pulmonary fibrosis as a sequela of a prior SARS-CoV-2 infection. One or more anti-Gal3 antibodies or binding fragments thereof are administered to the patients enterally, orally, intranasally, parenterally, subcutaneously, intramuscularly, intradermally, or intravenously.

[0688] The anti-Gal3 antibodies or binding fragments thereof are administered as doses at an amount of 1 ng as a unit dose (or in the alternative, an amount of 10, 100, 1000 ng, or 1, 10, 50, 100, 200, 300, 400, 500, 600, 700, 800, 900, 1000 μg, or 1, 10, 100, 200, 300, 400, 500, 600, 700, 800, 900, 1000 mg as a unit dose, or any amount within a range defined by any two of the aforementioned amounts, or any other amount appropriate for optimal efficacy in humans. The doses are administered every 1 day (or in the alternative, every 2, 3, 4, 5, 6, 7, 8, 9, 10, 11, 12, 24, 36, or 48 days or weeks or any time within a range defined by any two of the aforementioned times).

[0689] A reduction in fibrotic tissue is observed in the patients following administration of the anti-Gal3 antibodies or binding fragments thereof. An improvement to other sequelae of the SARS-CoV-2 infection, including but not limited to another fibrosis, pulmonary edema, cardiovascular disease, thrombosis, neurological disease, kidney disease, or liver disease may be also seen.

[0690] Administration of the anti-Gal3 antibodies or binding fragments may be performed in conjunction with another antiviral or anti-inflammatory therapy. Potential antiviral or anti-inflammatory therapeutics may include but are not limited to chloroquine, hydroxychloroquine, favipiravir, favilavir, remdesivir, tocilizumab, baricitinib, acalabrutinib, galidesivir, sarilumab, lopinavir, ritonavir, darunavir, ribavirin, dexamethasone, ciclesonide, convalescent plasma, interferon-α, pegylated interferon-α, or interferon alfa-2b, or any combination thereof. Patients will be monitored for side effects such as dizziness, nausea, diarrhea, depression, insomnia, headaches, itching, rashes, fevers, or other known side effects of the provided antiviral therapeutics.

### Example 8. Anti-Gal3 Antibodies Targeted to the N-Terminal Domain or TRD Reduces Cytokine Release Syndrome

[0691] Patients present with cytokine release syndrome (CRS, cytokine storm) and other inflammatory symptoms including but not limited to fever, headache, myalgia, arthralgia, fatigue, nausea, diarrhea, dermatitis, tachycardia, hypotension, hypoxia, tachypnea, pulmonary edema, azotemia, transaminitis, hyperbilirubinemia, or organ failure. In some alternatives, the CRS is a result of another disease, infection or condition. In some alternatives, the CRS is a result of a bacterial infection. In some alternatives, the CRS is a result of sepsis. In some alternatives, the CRS is a result of CAR T therapy. In some alternatives, the CRS is a result of a viral infection. In some alternatives, the CRS is a result of a coronavirus infection. In some alternatives, the CRS is a result of a SARS-related coronavirus infection. In some alternatives, the CRS is a result of a SARS-CoV-2 virus infection. In some alternatives, the CRS is a result of sepsis caused by a viral infection. In some alternatives, the CRS is a result of sepsis caused by a coronavirus infection. In some alternatives, the CRS is a result of sepsis caused by a SARS-related coronavirus infection. In some alternatives, the CRS is a result of sepsis caused by a SARS-CoV-2 virus infection. One or more anti-Gal3 antibodies or binding fragments thereof described herein are administered to the patients enterally, orally, intranasally, parenterally, subcutaneously, intramuscularly, intradermally, or intravenously.

[0692] The anti-Gal3 antibodies or binding fragments thereof are administered as doses at an amount of 1 ng as a unit dose (or in the alternative, an amount of 10, 100, 1000 ng, or 1, 10, 50, 100, 200, 300, 400, 500, 600, 700, 800, 900, 1000 μg, or 1, 10, 100, 200, 300, 400, 500, 600, 700, 800, 900, 1000 mg as a unit dose, or any amount within a range defined by any two of the aforementioned amounts, or any other amount appropriate for optimal efficacy in humans. The doses are administered every 1 day (or in the alternative, 2, 3, 4, 5, 6, 7, 8, 9, 10, 11, 12, 24, 36, or 48 days or weeks or any time within a range defined by any two of the aforementioned times).

[0693] A reduction of symptoms related to CRS is observed in the patient following administration of the anti-Gal3 antibodies or binding fragments thereof.

[0694] To validate the outcome of anti-Gal3 antibody treatment on the wellbeing of animals with severe CRS, eight-week-old male C57BL/6 mice (Jackson Laboratory) were injected i.p. with 10 mg/kg of LPS (Sigma, Escherichia coli 0127:B8; Cat: L3129-100MG) to induce sepsis. In most severe sepsis cases, systemic inflammation is accompanied by a drop in body temperature (hypothermia). LPS-treated mice were divided into two groups for treatments (PBS, n=9 vs. hIMT001 (human IMT001), n=10). LPS-treated mice received two doses of hIMT001 antibody (10 mg/kg, i.p.) or vehicle control (PBS) after one hour and 25 hours following LPS injection. Five healthy C57BL/6 animals were used as a control. Body weight, body temperature by rectal thermometer and clinical observation were monitored for forty-eight hours. Mice treated with LPS and PBS experienced substantial hypothermia, agreeing with evidence that LPS can cause systemic inflammation and hypothermia to mice. However, hIMT001 was able to significantly reverse the hypothermia compared to the PBS-treated group (FIG. 21). Multiple t-tests were used to compare PBS vs. hIMT001 in LPS-treated mice at different time points. (*) p=0.008047 at 24 hours after LPS injection.

[0695] Administration of the anti-Gal3 antibodies or binding fragments may be performed in conjunction with another antiviral or anti-inflammatory therapy. Potential antiviral or anti-inflammatory therapeutics may include but are not limited to chloroquine, hydroxychloroquine, favipiravir, favilavir, remdesivir, tocilizumab, baricitinib, acalabrutinib, galidesivir, sarilumab, lopinavir, ritonavir, darunavir, ribavirin, dexamethasone, ciclesonide, convalescent plasma, interferon-α, pegylated interferon-α, or interferon alfa-2b, anti-cytokine antibodies, angiotensin-converting enzyme inhibitors, angiotensin II receptor blockers, corticosteroids, free radical scavengers, TNF-α blockers or any combination thereof. Patients will be monitored for side effects such as dizziness, nausea, diarrhea, depression, insomnia, headaches, itching, rashes, fevers, or other known side effects of the provided antiviral therapeutics.

### Example 9. Gal3-Targeted Antibodies Bind to Distinct Epitopes of Gal3

[0696] To identify the epitopes to which Gal3 antibodies bound, a library of 20 amino acid peptides representing portions of Gal3, summarized in FIG. 7, was produced and the ability to bind Gal3 antibodies was evaluated by ELISA.

[0697] At least 2 μg/ml of hGal3 peptide in 50 μl of PBS or 0.1 μg/ml of full-length human Gal3 protein (GenScript or Acro Biosystems, GA3-H5129) were diluted in PBS (Corning, 21-030-CM) to concentrations of at least 2 μg/ml or 0.1 μg/ml, respectively, and added to the wells of a 96-well ELISA plate (Thermo Fisher, 44-2404-21). After incubating the plate at 4° C. overnight, the plate was washed three times with PBST (PBS with 0.05% Tween 20 [VWR, 0777]). The plate was then blocked for an hour with 2% BSA (EMD Millipore, 126609) in PBST at room temperature with gentle rocking. Thereafter, the 2% BSA in PBST was discarded and human Gal3 hybridoma supernatants or antibodies were diluted in 2% BSA in PBST to concentrations of at least 0.1 μg/ml and added to the wells. The plate was incubated for an hour at room temperature with gentle rocking and then washed three times with PBST. Afterwards, Goat Anti-Mouse IgG-HRP (Jackson ImmunoResearch, 115-036-1461) or Goat Anti-Rat IgG HRP (Abcam, ab205720) diluted in 2% BSA in PBST (1:4000) were added to the wells. The plate was incubated for 30 minutes to 1 hour at room temperature with gentle rocking and then washed three times with PBST. TMB substrate (Thermo Scientific, 34029) was then added to each well. The reaction was stopped with 1M HCl (JT Baker, 5620-02) and read using a plate reader (Molecular Devices) at absorbance of 450 nm.

[0698] Binding of Gal3-binding antibodies to the peptide array was observed at multiple locations, with the majority of binding observed in peptides 1-8, summarized in FIG. 7. Six separate Gal3-binding antibodies (6H6.2D6, 20H5.A3, 20D11.2C6, 19B5.2E6, 15G7.2A7, 23H9.2E4) all bound peptide 1 of Gal3, corresponding to amino acids 1-20 of Gal3, ADNFSLHDALSGSGNPNPQG (SEQ ID NO: 3). Similarly, three separate Gal3-binding antibodies (4G2.2G6, 3B11.2G2, and 13A12.2E5) bound peptide 4 of Gal3, corresponding to amino acids 31-50 of Gal3, GAGGYPGASYPGAYPGQAPP (SEQ ID NO: 6). Further, eleven Gal3-binding antibodies (IMT001, 846T.1H2, 13H12.2F8, 19D9.2E5, 14H10.2C9, 2D10.2B2, 4A11.2B5, 846.2H3, 846.1F5, 3B11.2D2, and 13A12.2E5) all bound peptide 6 of Gal3, corresponding to amino acids 51-70 of Gal3, GAYPGQAPPGAYPGAPGAYP (SEQ ID NO: 8). Additionally, twelve Gal3-binding antibodies (6H6.2D6, 20H5.A3, 20D11.2C6, 13H12.2F8, 19B5.2E6, 23H9.2E4, 15G7.2A7, 19D9.2E5, 14H10.2C9, 7D8.2D8, 15F10.2D6 and 846.14A2) all bound peptide 7 of Gal3, corresponding to amino acids 61-80 of Gal3, AYPGAPGAYPGAPAPGVYPG (SEQ ID NO: 9).

[0699] As illustrated in FIG. 7, peptides 4, 5, 6, and 7 share repeated amino acid sequences comprised of proline-glycine (PG) and tyrosine-proline-glycine (YPG), indicating a common feature that may explain the ability of Gal3-targeted antibodies to bind to multiple Gal3 peptides. Further, the amino acid sequence glycine-x-tyrosine-proline-glycine (GxYPG), where x may be the amino acids alanine (A), glycine (G), or valine (V), is shared in peptides 4, 6, and 7, each of which possess two such sequences separated by 3 amino acids. Accordingly, the presence of two GxYPG sequences in close apposition is likely predictive of the ability to bind Gal3-targeted antibodies. Additionally, the Grantham distance of alanine, glycine, and valine is Ala-Val: 64, Ala-Gly: 60, Val-Gly: 109, thereby predicting that amino acids with similarly low Grantham distances may similarly be able to substitute at the variable region, including proline and threonine.

### Example 10. Humanized Anti-Gal3 Antibodies have High Affinity for Gal3 of Different Species

[0700] Humanized IMT001 and IMT006a, which were derived from mouse mAbs, both have high affinity for human (IMT001: 3.6 nM, IMT006a: 8.9 nM) and cynomolgus (IMT001: 8.9 nM, IMT006a: 5.1 nM) Gal3 (FIG. 20). IMT001 also has high affinity for mouse Gal3 (IMT001: 2.3 nM, IMT006a: 40000 nM) and rat Gal3 (IMT001: 14 nM, IMT006a: undetected).

### Example 11. The Amino-Terminal Domain of Gal3 Promotes Activation of Neutrophils

[0701] To determine if Gal3 mediates activation of neutrophils and which domain might be implicated, wild-type Gal3 (Gal3 WT) was compared to Gal3 with changes in the N-terminal domain: a truncation from residues 1-64 (Gal3 Cut; Gal3C) and a proline-to-histidine point mutation at residue 64 (P64H; Gal3 Mut).

[0702] HL60 promyelocytic cells (ATCC, #CCL-240) were stimulated for three days with 1.3% DMSO to differentiate the cell line into neutrophils (as in Milius and Weiner, Meth. Mol. Biol. 591:147-158 (2010), hereby incorporated by reference in its entirety). 2×10⁵ cells were then plated in 200 μL serum-free media on a 96 well plate in duplicate for each condition. One plate was set up for each of two time points (30 minutes and 4 hours). Gal3 WT (TrueBinding, QC200361), Gal3 Cut (truncated version of Gal3 (AA 65-251), TrueBinding, QCB200349), and Gal3 Mut (mutated version of Gal3 (P64H), TrueBinding, QC200359) at 4, 2, 1, 0.5, 0.1, or 0 μM were added to cells. After 30 minutes, cells were harvested and stained for flow cytometry. After 4 hours, 100 μL of supernatant was collected for ELISA.

[0703] To stain for flow cytometry, cells were incubated for 15 minutes on ice with 1:20 Human TruStain FcX™ (Biolegend #422302) in PBS. CD62L-APC (Biolegend #304810) or mouse IgG1-kappa-APC isotype control (Biolegend #400222) were added to cells at a final dilution of 1:40, and cells were stained for 30 minutes before washing. Data was acquired on an Attune flow cytometer (Thermo Fisher) and analyzed using FlowJo software (TreeStar). The percent of cells that expressed CD62L was calculated as those with fluorescence greater than isotype control-stained cells. To measure cytokines, supernatants were tested on a Human IL-8 Duoset ELISA kit (R&D #DY208), according to manufacturer's instructions. The optical density was measured on a SpectraMax Machine and the concentration of cytokine was calculated using SoftMax Pro software. All data was graphed using GraphPad Prism software and shows mean±standard error.

[0704] Cleavage of the extracellular domain of CD62L allows neutrophils to extravasate into tissue and migrate to the source of injury or infection. Gal3 WT and Gal3 Mut decreased the percent of cells that were positive for CD62L in a dose-dependent manner, demonstrating that Gal3 can promote neutrophil infiltration into tissue. However, Gal3 Cut did not affect CD62L, demonstrating that the amino-terminal domain of Gal3 is required for activity (FIG. 22A). IL-8 is a cytokine that is up-regulated after activation and directs migration towards a source of injury or infection. Gal3 WT and Gal3 Mut increased IL-8 in a dose-dependent manner, demonstrating that Gal3 can activate neutrophils and enhance their migration. However, Gal3 Cut was less effective, demonstrating that the amino-terminal domain of Gal3 is required for activity (FIG. 22B).

### Example 12. Anti-Gal3 Antibodies Reduce Activation of Neutrophils

[0705] A neutrophil cell line was treated with Gal3 and readouts of neutrophil activation and migration were measured. HL60 promyelocytic cells (ATCC #CCL-240) were stimulated for four days with 1.3% DMSO to differentiate the cell line into neutrophils. 2×10⁵ cells were then plated in serum-free media on a 96 well plate in triplicate for each condition. Recombinant human Gal3 (rhGal3) (TrueBinding #QC200361) at 1, 0.5, 0.25, 0.125, and 0.0625 or 0 μM was pre-incubated for 30 minutes with 1 μM of the anti-Gal3 antibody TB001 or media-only control, then added to the cells. Samples were collected four hours after the treatment for analysis by flow cytometry and ELISA.

[0706] To stain for flow cytometry, cells were incubated for 15 minutes on ice with a 1:80 dilution of Human TruStain FcX™ (Biolegend #422302) in PBS. CD62L-APC (Biolegend #304810) was added to cells at a final dilution of 1:40, and cells were stained for 30 minutes before washing. Data was acquired on an Attune flow cytometer (Thermo Fisher) and analyzed using FlowJo software (TreeStar). The percent of cells that expressed CD62L was calculated as those with higher fluorescence than with unstained control cells. To measure cytokines, supernatants were tested on a Human IL-8 Duoset ELISA kit (R&D #DY208), according to manufacturer's instructions. The optical density was measured on a SpectraMax machine and the concentration of cytokine was calculated using SoftMax Pro software. All data was graphed using GraphPad Prism software with technical replicate values shown for each condition.

[0707] Cleavage of the extracellular domain of CD62L allows neutrophils to extravasate into tissues and migrate to the source of injury or infection. rhGal3 decreased the percent of cells that were positive for CD62L in a dose-dependent manner, demonstrating that Gal3 can promote neutrophil infiltration into tissue. Treatment with TB001 reversed the loss of CD62L (FIG. 23A).

[0708] IL-8 is a cytokine that is up-regulated after activation and directs migration towards a source of injury or infection. rhGal3 increased IL-8 in a dose-dependent manner, demonstrating that Gal3 can activate neutrophils and enhance their migration. Treatment with TB001 reversed the increase of IL-8 production (FIG. 23B).

[0709] To identify additional anti-Gal3 antibodies that can suppress neutrophil function, a panel of anti-Gal3 antibodies or isotype control MOPC21 hIgG4 were tested on HL60 cells differentiated for 96 hours with 1.3% DMSO. 1 μM antibody was pre-incubated with 1 μM of rhGal3 for 30 minutes. The complexes were then added to cells for four hours before testing with CD62L and IL-8 expression.

[0710] To stain for flow cytometry, cells were incubated for 15 minutes on ice with a 1:20 dilution of Human TruStain FcX™ (Biolegend #422302) in PBS. CD62L-APC (Biolegend #304810) or Mouse IgG1, kappa-APC isotype control (Biolegend #400222) was added to cells at a final dilution of 1:40, and cells were stained for 30 minutes before washing. Data was acquired on an Attune flow cytometer (Thermo Fisher) and analyzed using FlowJo software (TreeStar). The percent of cells that expressed CD62L was calculated as those with higher fluorescence than with isotype control-stained cells and the average of technical replicates was calculated (Table 2).

[0711] To measure cytokines, supernatants were tested on a Human IL-8 Duoset ELISA kit (R&D #DY208), according to manufacturer's instructions. The optical density was measured on a SpectraMax machine and the concentration of cytokine was calculated using SoftMax Pro software. All data was graphed using GraphPad Prism software and the average of technical replicates was calculated. The level of IL-8 induced by 1 μM rhGal with or without anti-Gal3 antibodies is shown in Table 2. Antibodies that reduce CD62L cleavage by at least 75% and/or reduce IL-8 production by at least 33% are listed in Table 3.

[0712] The antibody 14D11.2D2 is an antibody specific for the C-terminal carbohydrate binding domain of Gal3 and has been previously described in PCT Publication WO 2019/152895, which is hereby expressly incorporated by reference in its entirety.

TABLE 2
Inhibition of CD62L shedding and IL-8
production by anti-Gal3 antibodies

| | | % inhibition | % inhibition |
|---|---|---|---|
| | | of CD62L | of IL-8 |
| | | shedding | production |
| | | (relative | (relative |
| | | to isotype | to isotype |
| | Antibody | control-stained | control-stained |
| Antibody Name | Bin | cells) | cells) |
| TB001 | 1 | 87.2 | 70.5 |
| 20H5.A3 | 3 | 66.3 | 18.0 |
| 23H9.2E4 | 3 | 91.9 | 2.5 |
| 2D10-VH0-VL0 | 3 | 62.4 | −1.7 |
| TB006 (4A11.H3L1) | 3 | 76.1 | 12.5 |
| 15G7.2A7 | 5 | 110.0 | 40.0 |
| 20D11.2C6 | 5 | 89.4 | 40.6 |
| 13A12.2E5 | 7 | 87.1 | 29.8 |
| 3B11.2G2 | 7 | 92.7 | 25.2 |
| 14H10.2C9 | 8 | 86.3 | −9.4 |
| 15F10.2D6 | 8 | 82.5 | 50.0 |
| 7D8.2D8 | 8 | 88.6 | 20.8 |
| 846T.14E4 | 8 | 90.3 | 45.7 |
| (F846TC.14E4) | | | |
| 846T.7F10 | 8 | 96.1 | 48.3 |
| (F846TC.7F10) | | | |
| 849.8D10 | 8 | 180.0 | 53.4 |
| (F849C.8D10) | | | |
| 849.2D7 | 10 | 78.1 | 52.8 |
| 24D12.2H9 | 11 | 73.1 | 0.8 |
| 6B3.2D3 | 11 | 98.9 | 15.6 |
| 849.1D2 | 11 | 130.0 | 69.1 |
| 13G4.2F8 | 12 | 94.3 | 43.8 |
| 9H2.2H10 | 12 | 67.7 | 30.7 |
| 846.1B2 (F846C.1B2) | 17 | 99.0 | 33.2 |
| 846.1F5 (F846C.1F5) | 17 | 76.3 | 50.1 |
| 846.1H12 | 17 | 100.0 | 53.7 |
| (F846C.1H12) | | | |
| 846.2H3 (F846C.2H3) | 17 | 93.6 | 56.1 |
| 846T.16B5 | 17 | 84.2 | 43.6 |
| (F846TC.16B5) | | | |
| 849.5H1 | 21 | 87.5 | 46.5 |
| 847.12C4 | B2C10 | 150.0 | 37.3 |
| 847.15D12 | B2C10 | 15.4 | −45.7 |
| 847.15H11 | B2C10 | 39.3 | 62.5 |
| 847.20H7 | B2C10 | 63.4 | −15.0 |
| 847.27B9 | B2C10 | 87.9 | 15.8 |
| 847.10C9 | CRD | 150.0 | 46.4 |
| 847.11D6 | CRD | 83.2 | 26.3 |
| 847.13E2-mH0mL1 | CRD | 79.9 | 7.4 |
| 847.13E2-mH0mL2 | CRD | 18.8 | −25.8 |
| 847.16D10 | CRD | 14.4 | −101.3 |
| 847.23F11 | CRD | 15.2 | −11.6 |
| 847.28D1 | CRD | 110.0 | 63.0 |
| 847.3B3 | CRD | 43.4 | 23.9 |
| 847.10B9 | Unassigned | 82.2 | 35.2 |
| (F847C.10B9) | | | |
| 847.11B1 | Unassigned | 29.2 | 30.0 |
| (F847C.11B1) | | | |
| 847.4B10 | Unassigned | 110.0 | 38.7 |
| (F847C.4B10) | | | |
| 849.8D12 | Unassigned | 74.4 | 12.4 |
| 846.2B11 | No binding | 8.2 | −20.0 |
| 846T.4C9 | No binding | 11.2 | −66.7 |
| 847.15F9 | No binding | 8.5 | −48.3 |
| 847.21B11 | No binding | 16.4 | −31.8 |
| 847.2B8 | No binding | 7.0 | −43.0 |
| 847.4D3 | No binding | 7.5 | −34.8 |
| 849.4F12 | No binding | 17.9 | −48.3 |
| 849.4B2 | No binding | 6.2 | −42.6 |
| 846.1H5 (F846C.1H5) | Unassigned | 100.0 | 38.6 |
| 14D11.2D2 | Unassigned | 86.2 | 35.0 |
| 847.14H4 | Unassigned | 34.4 | −38.8 |
| 847.26F5 | Unassigned | 69.7 | 32.6 |
| (F847C.26F5) | | | |
| 849.2F12 | Unassigned | 120.0 | 58.3 |
| MOPC21 (mouse | Unassigned | 21.1 | −18.7 |
| isotype) | | | |

TABLE 3
Exemplary anti-Gal3 antibodies with significant
effect on CD62L shedding and IL-8 production

| | % inhibition of | % inhibition of |
|---|---|---|
| | CD62L shedding | IL-8 shedding |
| Antibody | (relative to isotype | (relative to isotype |
| Name | control-stained cells) | control-stained cells) |
| 846.1H5 | 100.0 | 38.6 |
| 847.4B10 | 110.0 | 38.7 |
| 847.10B9 | 82.2 | 35.2 |
| 847.28D1 | 110.0 | 63.0 |
| 847.10C9 | 150.0 | 46.4 |
| 847.12C4 | 150.0 | 37.3 |
| 849.5H1 | 87.5 | 46.5 |
| 846.2H3 | 93.6 | 56.1 |
| 846.1H12 | 100.0 | 53.7 |
| 846.1F5 | 76.3 | 50.1 |
| 846T.16B5 | 84.2 | 43.6 |
| 846.1B2 | 99.0 | 33.2 |
| 13G4.2F8 | 94.3 | 43.8 |
| 849.1D2 | 130.0 | 69.1 |
| 849.2D7 | 78.1 | 52.8 |
| 849.8D10 | 180.0 | 53.4 |
| 15F10.2D6 | 82.5 | 50.0 |
| 846T.7F10 | 96.1 | 48.3 |
| 846T.14E4 | 90.3 | 45.7 |
| 20D11.2C6 | 89.4 | 40.6 |
| 15G7.2A7 | 110.0 | 40.0 |
| TB001 | 87.2 | 70.5 |
| 849.2F12 | 120.0 | 58.3 |
| 14D11.2D2 | 86.2 | 35.0 |

### Example 13. Anti-Gal3 Antibodies Reduce Inflammation in a Model of Inflammatory Lung Disease

[0713] The ability of anti-Gal3 antibodies to reduce lung inflammation in vivo was tested in a mouse model of chronic obstructive pulmonary disease (COPD). The animal experiment was performed in accordance with standard guidelines and regulations, and the protocol was approved by the Institutional Animal Care and Use Committee (IACUC) at TrueBinding. Elastase is a proteolytic enzyme that is released by activated neutrophils in the lungs and leads to breakdown of alveolar tissue, inflammation and emphysema. Five units of porcine pancreatic elastase (Elastin Products Company #EC134) was distilled intratracheally into C57BL/6 mice (Jackson Laboratory). Groups received either 0.4 mg/kg of mTB001, 2D10.2B2 anti-Gal3 antibody or MOPC21-mIgG2b-LALA isotype control (MOPC21) (n=9) intratracheally. Antibodies were administered intratracheally on days 0, 3, 7, 10, 14, 17, and 20 of the study. Mice (n=5) that did not receive elastase or antibodies served as healthy controls. Body weight was measured twice weekly to monitor health. On day 21 of the study, the broncheoalveolar fluid (BALF), plasma, and lung tissue was collected for analysis.

[0714] Blood samples were collected via cardiac puncture. Plasma samples were isolated by spinning down at 4° C. using 13,000 rpm for 10 minutes. BALF samples were collected by perfusing lungs with 0.7 mL PBS.

[0715] To measure Gal3 levels, ELISA was performed on plasma and BALF of healthy controls and MOPC21 treated animals using a Mouse Galectin-3 Duoset ELISA kit (R&D Systems #DY1197), according to manufacturer's instructions.

[0716] The levels of transcripts involved in inflammation and fibrosis were quantified using qPCR. mRNA was isolated using the RNeasy Plus Mini Kit (Qiagen, #74134) according to manufacturer's instructions. The isolated mRNA was reverse transcribed to cDNA using iScript™ Reverse Transcription Supermix (BioRad #1708841) with a CFX96 Touch Real-Time PCR Detection System thermocycler (BioRad) according to manufacturer's instructions. qRT-PCR was performed using SsoAdvanced™ Universal SYBR® Green Supermix (BioRad #1725174). The forward primer and reference primers were purchased from GenScript and sequences are displayed in Table 4. Expression levels were expressed relative to the internal control GAPDH according to the comparative threshold cycle (Ct) method. Results were expressed as mean expression±SEM. Unpaired t-tests were used to determine statistical significance.

[0717] The identity and cell number of leukocyte subsets in the BALF were quantified using flow cytometry. Cells were spun down from BALF, then incubated for 15 minutes with 1:100 TruStain FcX (Biolegend #101320), 1:100 CD25-BV605 (Biolegend #102036), 1:200 CD5-FITC (Biolegend #100406), 1:200 CD11b-BV510 (Biolegend #101263), 1:100 TCRb-PerCP-CY5.5 (Biolegend #109228), 1:200 F4/80-BV780 (Biolegend #123147), 1:200 CD11c-BV650 (Biolegend #117339), 1:200 Ly6G-APC (Biolegend #127614), and 1:1000 MHCII-APC-CY7 (Biolegend 107628). After 30 minutes, the cells were washed and resuspended in PBS+DAPI (Thermo Fisher #VC2962251). Cells were analyzed on an Attune flow cytometer (Thermo Fisher) and analyzed with FlowJo software (TreeStar). Neutrophils were defined as DAPI-TCRb-F4/80-CD45+CD11b+Ly6G+ cells. Data was plotted with GraphPad Prism and one-way ANOVA was used to determine statistical significance.

[0718] The levels of myeloperoxidase (MPO) and keratinocyte-derived chemokine (KC), two mediators associated with neutrophil number and function, were quantified by ELISA. Mouse myeloperoxidase (MPO) Duoset kit (R&D Systems #DY3667) and Mouse KC Duoset kit (R&D Systems #DY453) were used according to manufacturer's instructions for the respective kits. Graphs display mean±SEM of animals in each group. Unpaired t-tests were used to determine statistical significance. KC is the murine analogue for CXCL1/growth-regulated oncogene α (GROα) and IL-8 in humans.

[0719] As depicted in FIG. 24A, expression of Gal3 protein is elevated in lungs but not the plasma of elastase-treated animals compared to healthy controls. Transcript levels of Gal3 were also elevated, as depicted in FIG. 24B. Hence, the target of the tested antibodies is up-regulated specifically where therapeutic action is required.

[0720] As depicted in FIG. 24B, transcripts associated with inflammation and fibrosis were increased in the lungs of MOPC21-treated animals compared to healthy controls. 2D10.2B2 (2D10) significantly reduced transcripts associated with neutrophil number and function (Ly6c1, Kc, Inos), inflammatory cytokines (Il6, Tnfa, Il1b), and fibrosis (Col1A1, aSma, Tgfb, Vegfa, Vegfb). mTB001 reduced a smaller subset of transcripts, including Tnfa, Inos, Vegfa, and Col1a1. Hence, Gal3 antibodies are able to reduce inflammation and fibrosis in lungs.

[0721] Neutrophils are a major source of lung inflammation. As depicted in FIG. 24C, the percentage and absolute numbers of neutrophils were increased in the lungs of MOPC21-treated animals compared to healthy controls, consistent with induction of inflammatory disease. Treatment with 2D10.2B2 significantly reduced the percentage and number of neutrophils compared to MOPC21 controls. There was also a trend towards reduction in mTB001 treated animals. Hence, anti-Gal3 antibodies can suppress a cellular mediator of fibrosis.

[0722] As depicted in FIG. 24D, MPO and KC were increased in the lungs of MOPC21-treated animals compared to healthy controls, consistent with activation of neutrophils in inflammatory disease. mTB001 and 2D10.2B2 significantly reduced MPO. 2D10.2B2 also significantly reduced KC. Hence, these tested anti-Gal3 antibodies can reduce biomarkers of neutrophil activity.

TABLE 4
Primers used for measuring transcript levels of
genes associated with inflammation and fibrosis

| Transcript | Forward Primers | Reverse Primers |
|---|---|---|
| Il6 | TTCCATCCAGTTGCCTTCTT | CAGAATTGCCATTGCACAAC |
| | (SEQ ID NO: 797) | (SEQ ID NO: 798) |
| Tnfa | AAGAGGCACTCCCCCAAAAG | GTTTGCTACGACGTGGGCT |
| | (SEQ ID NO: 799) | (SEQ ID NO: 800) |
| Illb | GCAGTGGTTCGAGGCCTAAT | TGATACTGCCTGCCTGAAGC |
| | (SEQ ID NO: 801) | (SEQ ID NO: 802) |
| Colla1 | CCTCAGGGTATTGCTGGACAAC | CAGAAGGACCTTGTTTGCCAGG |
| | (SEQ ID NO: 803) | (SEQ ID NO: 804) |
| aSma | TGAACAAGCCGGTGCTCTC | GGTCAGGATACCTCGCTTGC |
| | (SEQ ID NO: 805) | (SEQ ID NO: 806) |
| Tgfb | ATGCTAAAGAGGTCACCCGC | TGCCGTACAACTCCAGTGAC |
| | (SEQ ID NO: 807) | (SEQ ID NO: 808) |
| Vegfa | CTGCTGTAACGATGAAGCCCTG | GCTGTAGGAAGCTCATCTCTCC |
| | (SEQ ID NO: 809) | (SEQ ID NO: 810) |
| Vegfb | ACTGGGCAACACCAAGTCCGAA | CACATTGGCTGTGTTCTTCCAGG |
| | (SEQ ID NO: 811) | (SEQ ID NO: 812) |
| Inos | AAGGCAAGCACCTTGGAAGA | GGACAGCTTCTGGTCGATGT |
| | (SEQ ID NO: 813) | (SEQ ID NO: 814) |
| Gal3 | GCCCTTGCCTGGAGGAGTCATG | CATTGAAGCGGGGGTTAAAGTGG |
| | (SEQ ID NO: 815) | (SEQ ID NO: 816) |
| Gapdh | CATCACTGCCACCCAGAAGACTG | ATGCCAGTGAGCTTCCCGTTCAG |
| | (SEQ ID NO: 817) | (SEQ ID NO: 818) |

### Example 14. Anti-Gal3 Antibodies Attenuate Systemic Lupus Erythematosus (SLE)

[0723] Systemic lupus erythematosus (SLE) is an autoimmune disease wherein the immune system makes antibodies against components of its own host. These are deposited as immune complexes around the body, interfering with normal functioning of tissues such as the kidney. Anti-DNA antibodies are amongst the most prevalent class of autoantibody in SLE.

[0724] An anti-Gal3 antibody was tested for its ability to block or attenuate the development of SLE in a mouse model. Spleens were removed from 10-12 week old DBA/2J mice (Jackson Laboratories #000671) and mashed through a 40 μM cell strainer into PBS to generate a single cell suspension. 6×10⁶ spleen cells in 200 μL PBS were injected i.v. into B6D2F1/J (Jackson Laboratories #100006) host mice to induce anti-DNA autoantibody production. Group 1 (n=7 host mice) were injected i.p. with 1 mg/kg mTB001 (TrueBinding, #QC200133) and Group 2 (n=6 host mice) were injected with PBS control twice weekly for nine weeks, starting the day before DBA/2J cells were injected. Group 3 (n=5 animals) received PBS instead of DBA/2J cells and were used as healthy controls.

[0725] After nine weeks, plasma was tested for the development of anti-single-stranded (ss) or double-stranded (ds) DNA autoantibodies using ELISA. ds-DNA (Thermo Fisher #15633-019) was boiled at 95° C. for 15 minutes to dissociate it into ss-DNA. 10 μg/mL of either ss-DNA or ds-DNA was plated overnight on ELISA plates. After washing three times in PBS+0.05% Tween-20 (PBST; Wash buffer), plates were coated for one hour in PBS+1% bovine serum albumin (BSA) (EMD Millipore Corp #126609-100GM). Plates were washed, then standards and samples were added to the plate. Standards were generated by making 15 two-fold dilutions of a mouse anti-DNA antibody (Abcam #ab27156) ranging from 1 μg/mL to 0.6 pg/mL. Samples were diluted 1:40, 1:400, and 1:4000 before adding to plates. After two hours, plates were washed and 1:10,000 goat anti-mouse-biotin antibody (Thermo Fisher #62-6540) was added to the plates for one hour. After washing, 1:10,000 streptavidin-HRP (Thermo Fisher #N100) was added for 30 minutes. After washing, TMB (Thermo Scientific #34029) was added for one minute before the reaction was stopped with 1N HCl. OD450 was read on a SpectraMax plate reader and data was analyzed using SoftMax Pro software. One-way ANOVA was used to determine statistical significance.

[0726] FIG. 25 demonstrates that hosts injected with DBA/2J cells developed anti-ss-DNA autoantibodies while no autoantibodies were detected in healthy controls. mTB001 significantly decreased levels of anti-ss-DNA autoantibodies by two-fold on average. DBA/2J cells induced development of anti-ds-DNA autoantibodies compared to healthy controls. mTB001 decreases levels of auto-ds-DNA autoantibodies.

### Example 15. Binning of Anti-Gal3 Antibodies

[0727] Table 2 also depicts epitope binning of the tested exemplary anti-Gal3 antibodies.

[0728] The epitope binning assay was done in a sandwich format on the high-throughput SPR-based Carterra LSA unit (CarterraBio, Salt Lake City, Utah). First, the purified antibodies were diluted to 10 μg/ml concentration in 10 mM NaOAc (pH 5.0) and then were covalently coupled via amine group to HC200M chip activated by EDC and S-NHS to immobilize antibodies to different positions of a 384-spot array. One hundred thirty-eight binning cycles were run on the array of immobilized antibodies. In each cycle, first, human Gal3 (AcroBio GA3-H5129) was injected over the entire array to bind to different antibodies (primary antibody), followed by one antibody (secondary antibody) selected among the panel of anti-GAL3 antibodies tested. At the end of each cycle, the array was regenerated by 10 mM Glycine (pH 2.0) to remove bound antigen and secondary antibody from the array. The data analysis was done using the Epitope software by CarterraBio.

[0729] Binning results are shown in Table 2. In total, 21 distinct bins were identified for anti-GAL3 antibodies that demonstrate binding to hGAL3 (8 tested antibodies did not bind hGAL3 when immobilized on the HC200M under the tested conditions).

[0730] Antibody TB001 defined bin 1. Antibodies 20H5.A3, 23H9.2E4, 2D10-VH0-VL0 and TB006 (4A11.H3L1) exhibited mutual competitive binding for hGAL3, but did not prevent binding of the rest of the clones, thus defining bin 3. Antibodies 15G7.2A7 and 20D11.2C6 exhibited mutual competitive binding for hGAL3, but did not prevent binding of the rest of the clones, thus defining bin 5. Antibodies 13A12.2E5 and 3B11.2G2 exhibited mutual competitive binding for hGAL3, but did not prevent binding of the rest of the clones, thus defining bin 7. Antibodies 14H10.2C9, 15F10.2D6, 7D8.2D8, 846T.14E4, 846T.7F10, and 849.8D10 exhibited mutual competitive binding for hGAL3, but did not prevent binding of the rest of the clones, thus defining bin 8. Antibody 849.2D7 defined bin 10. Antibodies 24D12.2H9, 6B3.2D3, 849.1D2 exhibited mutual competitive binding for hGAL3, but did not prevent binding of the rest of the clones, thus defining bin 11. Antibodies 13G4.2F8 and 9H2.2H10 exhibited mutual competitive binding for hGAL3, but did not prevent binding of the rest of the clones, thus defining bin 12. Antibodies 846.1B2, 846.1F5, 846.1H12, 846.2H3, and 846T.16B5 exhibited mutual competitive binding for hGAL3, but did not prevent binding of the rest of the clones, thus defining bin 17. Antibody 849.5H1 defined bin 21.

[0731] Antibodies 847.12C4, 847.15D12, 847.15H11, 847.20H7, and 847.27B9 exhibited mutual competitive binding and competed with binding with the commercially available anti-Gal3 antibody B2C10 for hGAL3, but did not prevent binding of the rest of the clones, thus defining bin “B2C10”. B2C10 has been epitope mapped to bind to the first 18 amino acids of Gal3. Antibodies 847.10C9, 847.11D6, 847.13E2-mH0mL1, 847.13E2-mH0mL2, 847.16D10, 847.23F11, 847.28D1, and 847.3B3 exhibited mutual competitive binding to the C-terminal carbohydrate-recognition domain (CRD), but did not prevent binding of the rest of the clones, thus defining bin “CRD”. Antibodies 847.10B9, 847.11B1, 847.4B10, 846.1H5, 847.14H4, 847.26F5, 849.2F12, 14D11.2D2, and MOPC21 were either not tested or not assigned to a bin. Antibodies 846.2B11, 846T.4C9, 847.15F9, 847.21B11, 847.2B8, 847.4D3, 849.4F12, and 849.4B2 were determined to not bind to hGAL3 under the conditions tested.

### Example 16. Anti-Gal3 Antibodies Reduces Cytokine Production by Neutrophils Under Pro-Inflammatory Conditions

[0732] Cytokines, such as TNFα and IL-6, released by neutrophils in response to pro-inflammatory conditions (e.g. infection or autoimmunity) can initiate and perpetuate disease symptoms in patients. The involvement of Gal3 in regulating cytokine secretion and the ability of anti-Gal3 antibody to alter any effects were tested. HL60 promyelocytic cells (ATCC, #CCL-240) were stimulated for four days with 1.3% DMSO to differentiate the cell line into neutrophils. 2×10⁵ cells were treated with a mixture of recombinant Gal3 and the pro-inflammatory stimulus lipopolysaccharide (LPS) with or without anti-Gal3 antibodies. The mixture was pre-incubated together before being added to cells. Conditions were assayed in duplicate or triplicate.

[0733] To prepare the mixture without antibodies, different concentrations of recombinant human Gal3 (rhGal3) (TrueBinding, #QC200361) ranging from 0.015625 μM to 1 μM were pre-incubated with media. To prepare the mixture with antibodies, 1 μM recombinant human Gal3 was pre-incubated with the anti-Gal3 antibodies TB001 or TB006 or MOPC21-hIgG4(S228P) isotype control at concentrations ranging from 0.0625 μM to 4 μM. For both mixtures, 0.1 ng/mL LPS (Sigma-Aldrich, #L2880) was added after 30 minutes. After the additional 30 minute incubation, the whole mixture was added to the differentiated HL60 cells. All treatments used serum-free media and are expressed as the final concentration when all components were added.

[0734] Supernatants were collected four hours after treatment for cytokine measurement and tested for cytokines using a TNFα ELISA kit (R&D, #DY288) and an IL-6 ELISA kit (Thermo Fisher, #88-7066-88), according to manufacturer's instructions. ELISA plates were read with a SpectraMax spectrophotometer and data analyzed with GraphPad Prism. Each dot in the graph represents a technical replicate. FIG. 26 displays data for TNFα and FIG. 27 displays data for IL-6.

[0735] Recombinant Gal3 enhances secretion of TNFα (FIG. 26) and IL-6 (FIG. 27) in a dose-dependent manner. Isotype control co-treatment did not affect cytokine production, but anti-Gal3 antibodies were able to block it. Specifically TNFα was blocked with an IC₅₀ of 0.3928 μM and 0.01106 μM for TB001 and TB006, respectively (FIG. 26). IL-6 was blocked with an IC₅₀ of 0.5095 μM and 0.03371 μM for TB001 and TB006, respectively (FIG. 27).

### Example 17. Gal3 Antibodies Across Various Bins Reduce Cytokine Secretion from Neutrophils Under Pro-Inflammatory Conditions

[0736] A neutrophil cell line was treated with Gal3 and readouts of neutrophil activation and migration were measured. HL60 promyelocytic cells (ATCC, #CCL-240) were stimulated for four days with 1.3% DMSO to differentiate the cell line into neutrophils. 2×10⁵ cells were then placed in serum-free media on a 96 well plate in triplicate for each condition. 1 μM recombinant human Gal3 (rhGal3) (TrueBinding, #QC200361) was pre-incubated for 30 minutes with 1 μM of a panel of anti-Gal3 antibodies or control media, then 0.1 ng/mL LPS was added for 30 minutes. Finally, the pre-incubated mixture of recombinant Gal3, anti-Gal3 antibodies, and LPS was added to the cells.

[0737] Supernatants were collected four hours after treatment for cytokine measurement using a TNFα ELISA kit (R&D, #DY288) and an IL-6 ELISA kit (Thermo Fisher, #88-7066-88), according to manufacturer's instructions. ELISA plates were read with a SpectraMax spectrophotometer and data analyzed with GraphPad Prism. Percent inhibition of cytokine production was calculated and the average from technical replicates is displayed in Table 5.

[0738] As seen in Table 5, 27 (56%) of anti-Gal3 antibody clones blocked TNFα by at least 20%. Of those, 19 also blocked IL-6 by at least 20%, with bins 3 and 11 having the most consistent effects on both cytokines. As presented in Table 6, a number of antibodies that blocked TNFα secretion unexpectedly promoted IL-6 production. In particular, this includes clones belonging to bins 7, 8, 17, and some antibodies binding to the C-terminal carbohydrate recognition domain of Gal3.

TABLE 5
Modulation of neutrophil TNFα and IL-6 secretion
by exemplary anti-Gal3 antibodies

| | | % inhibition | % inhibition |
|---|---|---|---|
| Antibody | Antibody | of TNFα | of IL-6 |
| Name | Bin | secretion | secretion |
| TB001 | 1 | 81.4 | 45.6 |
| 20H5.A3 | 3 | 60.8 | 77.5 |
| 23H9.2E4 | 3 | 100.0 | 92.6 |
| 2D10-VH0-VL0 | 3 | 39.6 | 21.7 |
| 15G7.2A7 | 5 | 46.1 | 31.0 |
| 20D11.2C6 | 5 | 69.1 | 43.7 |
| 13A12.2E5 | 7 | 61.8 | 39.4 |
| 3B11.2G2 | 7 | 46.1 | -4.6 |
| 14H10.2C9 | 8 | 54.0 | 55.6 |
| 15F10.2D6 | 8 | 73.5 | 51.5 |
| 7D8.2D8 | 8 | −11.5 | 17.4 |
| 846T.14E4 | 8 | 50.1 | 15.7 |
| (F846TC.14E4) | | | |
| 846T.7F10 | 8 | 72.3 | −2.5 |
| (F846TC.7F10) | | | |
| 849.8D10 | 8 | −5.5 | −75.8 |
| (F849C.8D10) | | | |
| 849.2D7 | 10 | 42.7 | 39.0 |
| 24D12.2H9 | 11 | 46.5 | 22.3 |
| 6B3.2D3 | 11 | −1.2 | 0.2 |
| 849.1D2 | 11 | 37.0 | 26.8 |
| 13G4.2F8 | 12 | 83.2 | 55.1 |
| 9H2.2H10 | 12 | −39.2 | −99.1 |
| 846.1B2 (F846C.1B2) | 17 | 43.9 | −9.0 |
| 846.1F5 (F846C.1F5) | 17 | 51.7 | −16.0 |
| 846.1H12 | 17 | 95.3 | 51.8 |
| (F846C.1H12) | | | |
| 846.2H3 (F846C.2H3) | 17 | 62.8 | -49.1 |
| 846T.16B5 | 17 | −11.4 | −203.6 |
| (F846TC.16B5) | | | |
| 847.12C4 | B2C10 | −5.4 | −0.7 |
| 847.15D12 | B2C10 | −152.7 | −71.9 |
| 847.15H11 | B2C10 | 100.0 | 94.7 |
| 847.20H7 | B2C10 | −184.9 | −155.1 |
| 847.27B9 | B2C10 | 70.1 | −84.7 |
| 847.10C9 | CRD | −246.3 | >−1000 |
| 847.11D6 | CRD | −3.1 | 22.7 |
| 847.28D1 | CRD | 80.5 | 78.6 |
| 847.3B3 | CRD | 94.3 | 72.3 |
| 846.2B11 | No binding | −98.0 | -0.5 |
| 846T.4C9 | No binding | −298.6 | −38.3 |
| 847.15F9 | No binding | −178.3 | 16.6 |
| 847.21B11 | No binding | −136.3 | 27.3 |
| 849.4F12 | No binding | −81.5 | 1.2 |
| 849.4B2 | No binding | −161.9 | −9.8 |
| 846.1H5 (F846C.1H5) | Unassigned | −162.0 | −49.7 |
| 847.10B9 | Unassigned | 22.6 | −17.7 |
| (F847C.10B9) | | | |
| 847.11B1 | Unassigned | 53.8 | 49.4 |
| (F847C.11B1) | | | |
| 847.26F5 | Unassigned | −64.7 | 5.8 |
| (F847C.26F5) | | | |
| 847.4B10 | Unassigned | 65.5 | 38.6 |
| (F847C.4B10) | | | |
| 847.14H4 | Unassigned | −181.3 | −71.4 |
| 849.2F12 | Unassigned | 12.8 | 19.2 |
| F847C.21H6 | 1 | 0.2 | −33.8 |

TABLE 6
Exemplary anti-Gal3 antibodies that have
differential effects on neutrophil secretion

| | | % inhibition | % inhibition | |
|---|---|---|---|---|
| Antibody | Antibody | of TNFα | of IL-6 | |
| Name | Bin | secretion | secretion | Comment |
| TB001 | 1 | 81.4 | 45.6 | IL6-Blockers |
| 20H5.A3 | 3 | 60.8 | 77.5 | IL6-Blockers |
| 23H9.2E4 | 3 | 100.0 | 92.6 | IL6-Blockers |
| 2D10-VH0- | 3 | 39.6 | 21.7 | IL6-Blockers |
| VL0 | | | | |
| 15G7.2A7 | 5 | 46.1 | 31.0 | IL6-Blockers |
| 20D11.2C6 | 5 | 69.1 | 43.7 | IL6-Blockers |
| 13A12.2E5 | 7 | 61.8 | 39.4 | IL6-Blockers |
| 14H10.2C9 | 8 | 54.0 | 55.6 | IL6-Blockers |
| 15F10.2D6 | 8 | 73.5 | 51.5 | IL6-Blockers |
| 846T.14E4 | 8 | 50.1 | 15.7 | IL6-Blockers |
| (F846TC.14E4) | | | | |
| 849.2D7 | 10 | 42.7 | 39.0 | IL6-Blockers |
| 24D12.2H9 | 11 | 46.5 | 22.3 | IL6-Blockers |
| 849.1D2 | 11 | 37.0 | 26.8 | IL6-Blockers |
| 13G4.2F8 | 12 | 83.2 | 55.1 | IL6-Blockers |
| 846.1H12 | 17 | 95.3 | 51.8 | IL6-Blockers |
| (F846C.1H12) | | | | |
| 847.15H11 | B2C10 | 100.0 | 94.7 | IL6-Blockers |
| 847.28D1 | CRD | 80.5 | 78.6 | IL6-Blockers |
| 847.3B3 | CRD | 94.3 | 72.3 | IL6-Blockers |
| 847.11B1 | Unassigned | 53.8 | 49.4 | IL6-Blockers |
| (F847C.11B1) | | | | |
| 847.4B10 | Unassigned | 65.5 | 38.6 | IL6-Blockers |
| (F847C.4B10) | | | | |
| 3B11.2G2 | 7 | 46.1 | −4.6 | IL6-Inducers |
| 846T.7F10 | 8 | 72.3 | −2.5 | IL6-Inducers |
| (F846TC.7F10) | | | | |
| 846.1B2 | 17 | 43.9 | −9.0 | IL6-Inducers |
| (F846C.1B2) | | | | |
| 846.1F5 | 17 | 51.7 | −16.0 | IL6-Inducers |
| (F846C.1F5) | | | | |
| 846.2H3 | 17 | 62.8 | −49.1 | IL6-Inducers |
| (F846C.2H3) | | | | |
| 847.27B9 | B2C10 | 70.1 | −84.7 | IL6-Inducers |
| 847.10B9 | Unassigned | 22.6 | −17.7 | IL6-Inducers |
| (F847C.10B9) | | | | |

### Example 18. Formulations of Anti-Gal3 Antibodies can be Used to Treat a Coronavirus Infection in Humans

[0739] A patient presents with a coronavirus infection, is experiencing initial symptoms of a coronavirus infection, or is at risk of developing a coronavirus infection. In some embodiments, the coronavirus infection is a SARS-CoV, MERS-CoV, or SARS-CoV-2 infection. In some embodiments, one or more of the pharmaceutical antibody formulations disclosed herein are administered. In some embodiments, the one or more pharmaceutical antibody formulations are administered to the patient enterally, orally, intranasally, parenterally, intracranially, subcutaneously, intramuscularly, intradermally, or intravenously. In some embodiments, the formulation is administered intravenously or subcutaneously.

[0740] In some embodiments, the pharmaceutical antibody formulation comprises an anti-Gal3 antibody, and one or more excipients. In some embodiments, the pharmaceutical antibody formulation comprises an anti-Gal3 antibody and one or more of L-histidine, methionine, NaCl, polysorbate, and optionally sucrose and/or mannitol. The pharmaceutical antibody formulation is administered to the patient such that 1 mg (or in the alternative: 5 mg, 10 mg, 20 mg, 40 mg, or 50 mg) as a unit dose is administered to the patient. The formulation is administered daily (or in the alternative: weekly, bi-weekly, or every 10 days) for a duration of 10 months (or in the alternative: 11, 12, 13, 14, 15, 16, 17, or 18 months).

[0741] An improvement of the coronavirus infection or symptoms associated with the coronavirus infection is observed in the patient following administration of the pharmaceutical antibody formulation.

### Example 19. Stability Test of Antibody Formulations

[0742] Short term and long term stability of TB006 antibody formulations and preparations were assessed.

[0743] Two bags of TB006 diluted to 0.31 mg/mL in sterile bags pre-filled with 250 mL of 0.9% Sodium Chloride for injection, USP were tested. 4 mL of a 20 mg/mL antibody solution was used. The solutions were confirmed to be colorless and free of particulate matter before the experiment began and throughout the time course. Diluted samples were stored at 25±3° C. and sampled at 0, 0.5 hours, 1 hour, 2 hours, and 4 hours.

[0744] Preparations of dilute TB006 antibody formulations in bags ready for parenteral administration were stored at room temperature for 0-4 hours. After 0-4 hours, the preparation maintained at least 60% viability, and no visible particles were observed (Table 7).

TABLE 7
Injection In-use Stability Study Results (Bag 1 and 2)

| | | Bag #1 | | | | | Bag #2 | | | | |
|---|---|---|---|---|---|---|---|---|---|---|---|
| | | 0 h | 0.5 h | 1 h | 2 h | 4 h | 0 h | 0.5 h | 1 h | 2 h | 4 h |
| Appearance | Appearance | Colorless liquid, no visible particle | | | | | Colorless liquid, no visible particle | | | | |
| SoloVPE | Conc. | 0.28 | 0.30 | 0.30 | 0.30 | 0.30 | 0.31 | 0.30 | 0.30 | 0.30 | 0.30 |
| concentration | (mg/mL) | | | | | | | | | | |
| SEC-HPLC | Monomer | 99.3 | 99.4 | 99.3 | 99.2 | 99.4 | 99.2 | 99.3 | 99.3 | 99.4 | 99.4 |
| | (%) | | | | | | | | | | |
| cIEF | pI | 7.0 | 7.0 | 7.0 | 7.0 | 7.0 | 7.0 | 7.0 | 7.0 | 7.0 | 7.0 |
| | Acidic peak | 16-16.3 | 17.8-18 | 18-18.3 | 19.8-20 | 19.9-20 | 17.8-18 | 15-15.2 | 16-16.4 | 18.5-19 | 16.7-17 |
| | (%) | | | | | | | | | | |
| | Main Peak | 76.7-77 | 73-73.2 | 73 | 72 | 72.8-73 | 73.9-74 | 77 | 76-76.3 | 73-73.4 | 76-76.1 |
| | (%) | | | | | | | | | | |
| | Basic Peak | 7 | 9-9.1 | 8.7-9 | 8-8.2 | 7-7.4 | 8-8.3 | 7.8-8 | 7-7.3 | 8-8.1 | 7-7.2 |
| | (%) | | | | | | | | | | |
| CE-SDS | CE NR | 100 | 100 | 100 | 100 | 100 | 100 | 100 | 100 | 100 | 100 |
| | monomer (%) | | | | | | | | | | |
| | CE R HC + LC | 100 | 100 | 100 | 100 | 100 | 100 | 100 | 100 | 100 | 100 |
| | (%) | | | | | | | | | | |
| ELISA | IC₅₀ | 1.007 | 1.341 | 1.426 | 1.714 | 1.412 | 1.051 | 1.657 | 1.627 | 1.671 | 1.354 |
| Blocking | (μg/mL) | | | | | | | | | | |
| Assay | | | | | | | | | | | |
| HIAC | 2 μM | 890 | 1404 | 2082 | 2010 | 2307 | 156 | 68 | 27 | 60 | 44 |
| Subvisible | 5 μM | 116 | 221 | 397 | 400 | 471 | 53 | 17 | 2 | 20 | 11 |
| Particles | 10 μM | 12 | 39 | 69 | 83 | 111 | 14 | 4 | 1 | 4 | 2 |
| | 25 μM | 0 | 1.1 | 0 | 1.1 | 4.4 | 0 | 0 | 0 | 1 | 0 |

[0745] TB006 antibody formulations were kept for 0-3 months at either 5° C. for long term stability assays, or at 25° C./60% relative humidity (RH) for accelerated stability assays, according to standard FDA conditions. Both the long term and accelerated condition formulations were found to be within acceptable range for various tested parameters (Tables 8 and 9).

TABLE 8
Long-term Stability Testing Results (5° C.)

| | | Acceptance | | Testing results (Batch No. 095I0720) | | | | | |
|---|---|---|---|---|---|---|---|---|---|
| Test Item | Method | Criteria | | 0 months | | 1 month | | 3 months | |
| pI | cIEF | pI: 7.0 ± 0.3 | | pI: 7.0 | | pI: 7.0 | | pI: 7.0 | |
| Charge | cIEF | Acidic peak: ≤25% | | Acidic peak: 18% | | Acidic peak: 22% | | Acidic peak: 19% | |
| Variant | | Main peak: ≥65% | | Main peak: 74% | | Main peak: 71% | | Main peak: 73% | |
| | | Basic peak: ≤20% | | Basic peak: 8% | | Basic peak: 7% | | Basic peak: 8% | |
| Purity | SEC-UPLC | Monomer: ≥90.0% | | Monomer: 99.4% | | Monomer: 99.4% | | Monomer: 99.4% | |
| | | Aggregate: ≤10.0% | | Aggregate: 0.6% | | Aggregate: 0.6% | | Aggregate: 0.6% | |
| | | Fragment: ≤10.0% | | | | | | | |
| | Non-reduced | Monomer: ≥90% | | Monomer: 99% | | Monomer: 99% | | Monomer: 99% | |
| | CE-SDS | Fragment: ≤10% | | Fragment: 1% | | Fragment: 1% | | Fragment: 1% | |
| | Reduced CE- | LC + HC: ≥90.0% | | LC + HC: 100.0% | | LC + HC: 100.0% | | LC + HC: 100.0% | |
| | SDS | NGHC: ≤10.0% | | | | | | | |
| Binding | BLI | 50%-150% | | 3.0 | nM | 2.5 | nM | 3.0 | nM |
| Activity | | kD: 3.0 nM | | | | | | | |
| Protein | UV | 20.0 ± 2 | | 20.3 | mg/mL | 20.0 | mg/mL | 20.1 | mg/mL |
| Content | | mg/mL | | | | | | | |
| Polvsorbate | FLD-HPLC | 0.1-0.3 | | 0.28 | mg/mL | 0.24 | mg/mL | 0.21 | mg/mL |
| 80 (PS80) | | mg/mL | | | | | | | |
| Biological | ELISA | 50%-150% | | 2.5 | μg/mL | 1.8 | μg/mL | 1.5 | μg/mL |
| Activity | | IC50: 2.0 μg/mL | | | | | | | |
| pH | | 5.8 ± 0.5 | | 5.8 | | 5.8 | | 5.8 | |
| Container | USP Chap. | ≥2.0 | mL | 2.2 | mL | 2.2 | mL | 2.1 | mL |

| Content | 697 | | | | | | |
|---|---|---|---|---|---|---|---|
| Appearance | Visual | Clear, colorless to | | Clear, | | Clear, | Clear, |
| | Method | light yellow, | | colorless, | | colorless, | colorless, |
| | | essentially free of | | essentially free | | essentially free | essentially free |
| | | particles | | of particles | | of particles | of particles |
| Osmolality | Freezing | 230 ± 25 | | 228 | | 226 | 227 |
| | Point | mOsmol/kg | | mOsmol/kg | | mOsmol/kg | mOsmol/kg |
| | Depression | | | | | | |
| Sterility | USP Chap. | Complies with the | | Pass | | N/A | N/A |
| | 71 | test for sterility | | | | | |
| Bacterial | Kinetic- | ≤0.6 | EU/mg | <0.01 | EU/mg | N/A | N/A |

| | | | | | |
|---|---|---|---|---|---|
| Endotoxin | chromogenic | | | | |
| | assay | | | | |
| Sub-visible | Light | ≥10 μm: ≤6000 | ≥10 μm: 9 | N/A | ≥10 μm: 6 |
| Particles | Blockage | particles/vial | particles/vial | | particles/vial |
| | Method | ≥25 μm: ≤600 | ≥25 μm: <1 | | ≥25 μm: <1 |
| | | particles/vial | particle/vial | | particle/vial |

TABLE 9
Accelerated Stability Testing Results (25° C./60% RH)

| | | Acceptance | | Testing results (Batch No. 095I0720) | | | | | |
|---|---|---|---|---|---|---|---|---|---|
| Test Item | Method | Criteria | | 0 months | | 1 month | | 3 months | |
| pI | cIEF | pI: 7.0 ± 0.3 | | pI: 7.0 | | pI: 7.0 | | pI: 7.0 | |
| Charge | cIEF | Acidic peak: ≤25% | | Acidic peak: 18% | | Acidic peak: 22% | | Acidic peak: 23% | |
| Variant | | Main peak: ≥65% | | Main peak: 74% | | Main peak: 70% | | Main peak: 70% | |
| | | Basic peak: ≤20% | | Basic peak: 8% | | Basic peak: 8% | | Basic peak: 7% | |
| Purity | SEC-UPLC | Monomer: ≥90.0% | | Monomer: 99.4% | | Monomer: 99.4% | | Monomer: 99.3% | |
| | | Aggregate: ≤10.0% | | Aggregate: 0.6% | | Aggregate: 0.6% | | Aggregate: 0.7% | |
| | | Fragment: ≤10.0% | | | | | | | |
| | Non-reduced | Monomer: ≥90% | | Monomer: 99% | | Monomer: 99% | | Monomer: 99% | |
| | CE-SDS | Fragment: ≤10% | | Fragment: 1% | | Fragment: 1% | | Fragment: 1% | |
| | Reduced CE- | LC + HC: ≥90.0% | | LC + HC: 100.0% | | LC + HC: 100.0% | | LC + HC: 100.0% | |
| | SDS | NGHC: ≤10.0% | | | | | | | |
| Binding | BLI | 50%-150% | | 3.0 | nM | 2.5 | nM | 3.1 | nM |
| Activity | | kD: 3.0 nM | | | | | | | |
| Protein | UV | 20.0 ± 2 | | 20.3 | mg/mL | 19.9 | mg/mL | 20.1 | mg/mL |
| Content | | mg/mL | | | | | | | |
| Polvsorbate | FLD-HPLC | 0.1-0.3 | | 0.28 | mg/mL | 0.24 | mg/mL | 0.22 | mg/mL |
| 80 (PS80) | | mg/mL | | | | | | | |
| Biological | ELISA | 50%-150% | | 2.5 | μg/mL | 1.8 | μg/mL | 1.5 | μg/mL |
| Activity | | IC50: 2.0 μg/mL | | | | | | | |
| pH | | 5.8 ± 0.5 | | 5.8 | | 5.9 | | 5.9 | |
| Container | USP Chap. | ≥2.0 | mL | 2.2 | mL | 2.1 | mL | 2.2 | mL |

| Content | 697 | | | | | | |
|---|---|---|---|---|---|---|---|
| Appearance | Visual | Clear, colorless to | | Clear, | | Clear, | Clear, |
| | Method | light yellow, | | colorless, | | colorless, | colorless, |
| | | essentially free of | | essentially free | | essentially free | essentially free |
| | | particles | | of particles | | of particles | of particles |
| Osmolality | Freezing | 230 ± 25 | | 228 | | 229 | 231 |
| | Point | mOsmol/kg | | mOsmol/kg | | mOsmol/kg | mOsmol/kg |
| | Depression | | | | | | |
| Sterility | USP Chap. | Complies with the | | Pass | | N/A | N/A |
| | 71 | test for sterility | | | | | |
| Bacterial | Kinetic- | ≤0.6 | EU/mg | <0.01 | EU/mg | N/A | N/A |

| | | | | | |
|---|---|---|---|---|---|
| Endotoxin | chromogenic | | | | |
| | assay | | | | |
| Sub-visible | Light | ≥10 μm: ≤6000 | ≥10 μm: 9 | N/A | ≥10 μm: 7 |
| Particles | Blockage | particles/vial | particles/vial | | particles/vial |
| | Method | ≥25 μm: ≤600 | ≥25 μm: <1 | | ≥25 μm: <1 |
| | | particles/vial | particle/vial | | particle/vial |

[0746] In at least some of the previously described embodiments, one or more elements used in an embodiment can interchangeably be used in another embodiment unless such a replacement is not technically feasible. It will be appreciated by those skilled in the art that various other omissions, additions and modifications may be made to the methods and structures described above without departing from the scope of the claimed subject matter. All such modifications and changes are intended to fall within the scope of the subject matter, as defined by the appended claims.

[0747] With respect to the use of substantially any plural and/or singular terms herein, those having skill in the art can translate from the plural to the singular and/or from the singular to the plural as is appropriate to the context and/or application. The various singular/plural permutations may be expressly set forth herein for sake of clarity.

[0748] It will be understood by those within the art that, in general, terms used herein, and especially in the appended claims (e.g., bodies of the appended claims) are generally intended as “open” terms (e.g., the term “including” should be interpreted as “including but not limited to,” the term “having” should be interpreted as “having at least,” the term “includes” should be interpreted as “includes but is not limited to,” etc.). It will be further understood by those within the art that if a specific number of an introduced claim recitation is intended, such an intent will be explicitly recited in the claim, and in the absence of such recitation no such intent is present. For example, as an aid to understanding, the following appended claims may contain usage of the introductory phrases “at least one” and “one or more” to introduce claim recitations. However, the use of such phrases should not be construed to imply that the introduction of a claim recitation by the indefinite articles “a” or “an” limits any particular claim containing such introduced claim recitation to embodiments containing only one such recitation, even when the same claim includes the introductory phrases “one or more” or “at least one” and indefinite articles such as “a” or “an” (e.g., “a” and/or “an” should be interpreted to mean “at least one” or “one or more”); the same holds true for the use of definite articles used to introduce claim recitations. In addition, even if a specific number of an introduced claim recitation is explicitly recited, those skilled in the art will recognize that such recitation should be interpreted to mean at least the recited number (e.g., the bare recitation of “two recitations,” without other modifiers, means at least two recitations, or two or more recitations). Furthermore, in those instances where a convention analogous to “at least one of A, B, and C, etc.” is used, in general such a construction is intended in the sense one having skill in the art would understand the convention (e.g., “a system having at least one of A, B, and C” would include but not be limited to systems that have A alone, B alone, C alone, A and B together, A and C together, B and C together, and/or A, B, and C together, etc.). In those instances where a convention analogous to “at least one of A, B, or C, etc.” is used, in general such a construction is intended in the sense one having skill in the art would understand the convention (e.g., “a system having at least one of A, B, or C” would include but not be limited to systems that have A alone, B alone, C alone, A and B together, A and C together, B and C together, and/or A, B, and C together, etc.). It will be further understood by those within the art that virtually any disjunctive word and/or phrase presenting two or more alternative terms, whether in the description, claims, or drawings, should be understood to contemplate the possibilities of including one of the terms, either of the terms, or both terms. For example, the phrase “A or B” will be understood to include the possibilities of “A” or “B” or “A and B.”

[0749] In addition, where features or aspects of the disclosure are described in terms of Markush groups, those skilled in the art will recognize that the disclosure is also thereby described in terms of any individual member or subgroup of members of the Markush group.

[0750] As will be understood by one skilled in the art, for any and all purposes, such as in terms of providing a written description, all ranges disclosed herein also encompass any and all possible sub-ranges and combinations of sub-ranges thereof. Any listed range can be easily recognized as sufficiently describing and enabling the same range being broken down into at least equal halves, thirds, quarters, fifths, tenths, etc. As a non-limiting example, each range discussed herein can be readily broken down into a lower third, middle third and upper third, etc. As will also be understood by one skilled in the art all language such as “up to,” “at least,” “greater than,” “less than,” and the like include the number recited and refer to ranges which can be subsequently broken down into sub-ranges as discussed above. Finally, as will be understood by one skilled in the art, a range includes each individual member. Thus, for example, a group having 1-3 articles refers to groups having 1, 2, or 3 articles. Similarly, a group having 1-5 articles refers to groups having 1, 2, 3, 4, or 5 articles, and so forth.

[0751] While various aspects and embodiments have been disclosed herein, other aspects and embodiments will be apparent to those skilled in the art. The various aspects and embodiments disclosed herein are for purposes of illustration and are not intended to be limiting, with the true scope and spirit being indicated by the following claims.

[0752] A Sequence Listing in electronic format is submitted herewith. Some of the sequences provided in the Sequence Listing may be designated as Artificial Sequences by virtue of being non-naturally occurring fragments or portions of other sequences, including naturally occurring sequences. Some of the sequences provided in the Sequence Listing may be designated as Artificial Sequences by virtue of being combinations of sequences from different origins, such as humanized antibody sequences.

[0753] All references cited herein, including but not limited to published and unpublished applications, patents, and literature references, are incorporated herein by reference in their entirety and are hereby made a part of this specification. To the extent publications and patents or patent applications incorporated by reference contradict the disclosure contained in the specification, the specification is intended to supersede and/or take precedence over any such contradictory material.

1. An anti-Gal3 antibody or binding fragment thereof comprising (1) a light chain variable region comprising a V_{L}-CDR1, a V_{L}-CDR2, and a V_{L}-CDR3; and (2) a heavy chain variable region comprising a V_{H}-CDR1, a V_{H}-CDR2, and a V_{H}-CDR3, wherein
the V_{L}-CDR1 comprises an amino acid sequence having at least 60%, at least 70%, at least 80%, at least 90%, or 100% sequence identity to any amino acid sequence according to SEQ ID NOs: 170-220,
the V_{L}-CDR2 comprises an amino acid sequence having at least 60%, at least 70%, at least 80%, at least 90%, or 100% sequence identity to any amino acid sequence according to SEQ ID NOs: 221-247,
the V_{L}-CDR3 comprises an amino acid sequence having at least 60%, at least 70%, at least 80%, at least 90%, or 100% sequence identity to any amino acid sequence according to SEQ ID NOs: 248-296,
the V_{H}-CDR1 comprises an amino acid sequence having at least 60%, at least 70%, at least 80%, at least 90%, or 100% sequence identity to any amino acid sequence according to SEQ ID NOs: 27-70,
the V_{H}-CDR2 comprises an amino acid sequence having at least 60%, at least 70%, at least 80%, at least 90%, or 100% sequence identity to any amino acid sequence according to SEQ ID NOs: 71-111, 826, and
the V_{H}-CDR3 comprises an amino acid sequence having at least 60%, at least 70%, at least 80%, at least 90%, or 100% sequence identity to any amino acid sequence according to SEQ ID NOs: 112-169, 827.

2. (canceled)

3. The anti-Gal3 antibody or binding fragment thereof of claim 1, wherein the light chain variable region comprises a sequence having at least 80%, 81%, 82%, 83%, 84%, 85%, 86%, 87%, 88%, 89%, 90%, 91%, 92%, 93%, 94%, 95%, 96%, 97%, 98%, or 99% identity to the sequence selected from SEQ ID NOs: 374-447, 823-825.

4. (canceled)

5. The anti-Gal3 antibody or binding fragment thereof of claim 1, wherein the heavy chain variable region comprises a sequence having at least 80%, 81%, 82%, 83%, 84%, 85%, 86%, 87%, 88%, 89%, 90%, 91%, 92%, 93%, 94%, 95%, 96%, 97%, 98%, or 99% identity to the sequence selected from SEQ ID NOs: 297-373, 822, 828.

6. (canceled)

7. The anti-Gal3 antibody or binding fragment thereof of claim 1, wherein the anti-Gal3 antibody or binding fragment thereof comprises a light chain, wherein the light chain comprises a sequence having at least 80%, 81%, 82%, 83%, 84%, 85%, 86%, 87%, 88%, 89%, 90%, 91%, 92%, 93%, 94%, 95%, 96%, 97%, 98%, or 99% identity to the sequence selected from SEQ ID NOs: 495-538, 830.

8. (canceled)

9. The anti-Gal3 antibody or binding fragment thereof of claim 1, wherein the anti-Gal3 antibody or binding fragment thereof comprises a heavy chain, wherein the heavy chain comprises a sequence having at least 80%, 81%, 82%, 83%, 84%, 85%, 86%, 87%, 88%, 89%, 90%, 91%, 92%, 93%, 94%, 95%, 96%, 97%, 98%, or 99% identity to the sequence selected from SEQ ID NOs: 448-494, 829.

10. (canceled)

11. The anti-Gal3 antibody or binding fragment thereof of claim 1, wherein the anti-Gal3 antibody or binding fragment is selected from the group consisting of: TB001, TB006, 12G5.D7, 13A12.2E5, 14H10.2C9, 15F10.2D6, 19B5.2E6, 20D11.2C6, 20H5.A3, 23H9.2E4, 2D10.2B2, 3B11.2G2, 7D8.2D8, mIMT001, 4A11.2B5, 4A11.H1L1, 4A11.H4L2, 4G2.2G6, 6B3.2D3, 6H6.2D6, 9H2.2H10, 13G4.2F8, 13H12.2F8, 15G7.2A7, 19D9.2E5, 23B10.2B12, 24D12.2H9, F846C.1B2, F846C.1F5, F846C.1H12, F846C.1H5, F846C.2H3, F846TC.14A2, F846TC.14E4, F846TC.16B5, F846TC.7F10, F847C.10B9, F847C.11B1, F847C.12F12, F847C.26F5, F847C.4B10, F849C.8D10, F849C.8H3, 846.2B11, 846.4D5, 846T.1H2, 847.14H4, 846.2D4, 846.2F11, 846T.10B1, 846T.2E3, 846T.4C9, 846T.4E11, 846T.4F5, 846T.8D1, 847.10C9, 847.11D6, 847.15D12, 847.15F9, 847.15H11, 847.20H7, 847.21B11, 847.27B9, 847.28D1, 847.2B8, 847.3B3, 849.1D2, 849.2D7, 849.2F12, 849.4B2, 849.4F12, 849.4F2, 849.5C2, 849.8D12, F847C.21H6, 849.5H1, 847.23F11, 847.16D10, 847.13E2-mH0mL1, 847.13E2-mH0mL2, 847.12C4, 847.4D3, 2D10-VH0-VL0, or binding fragment thereof.

12. A method of treating lung fibrosis in a subject in need thereof, comprising:
administering to the subject an effective amount of an anti-Gal3 antibody or binding fragment thereof;
wherein the anti-Gal3 antibody or binding fragment thereof disrupts an interaction between Gal3 and a TGF-b receptor.

13. The method of claim 12, wherein the lung fibrosis is a sequela of a viral infection, wherein the viral infection is a coronavirus infection, a SARS-related coronavirus infection, or a SARS-CoV-2 coronavirus infection.

14.-27. (canceled)

28. A method of decreasing or inhibiting toxicity in a subject experiencing cytokine release syndrome (CRS) or vulnerable to CRS, the method comprising:
administering to the subject an effective amount of an anti-Gal3 antibody or binding fragment thereof.

29. The method of claim 28, wherein the CRS is a result of a bacterial infection, viral infection, fungal infection, protozoan infection, graft-versus-host disease, cytomegalovirus, Epstein-B an virus, hemophagocytic lymphohistiocystosis (HLH), Epstein-B an virus-associated HLH, sporadic HLH, macrophage activation syndrome (MAS), chronic arthritis, systemic Juvenile idiopathic Arthritis (sJIA), Still's Disease, Cryopyrin-associated Periodic Syndrome (CAPS), Familial Cold Auto-inflammatory Syndrome (FCAS), Familial Cold Urticaria (FCU), Muckle-Well Syndrome (MWS), Chronic Infantile Neurological Cutaneous and Articular (CINCA) Syndrome, cryopyrinopathy comprising inherited or de novo gain of function mutations in the NLRP3 gene, a hereditary auto-inflammatory disorder, acute pancreatitis, severe burns, trauma, acute respiratory distress syndrome (ARDS), Streptococcus, Pseudomonas, influenza, bird flu, H5N1, H1N1, variola virus, coronavirus, severe acute respiratory syndrome (SARS), SARS-CoV-1, SARS-CoV-2, sepsis, gram-negative sepsis, Gram-positive toxins, malaria, Ebola virus, variola virus, systemic Gram-negative bacterial infection, bacteremia, Jarisch-Herxheimer syndrome, glycosylphosphatidylinositol (GPI), or lipopolysaccharide, or treatment with an immunotherapy comprising rituximab, obinutuzumab, alemtuzumab, brentuximab, dacetuzumab, nivolumab, theralizumab, oxaliplatin, lenalidomide, T-cell engager molecules, bi-specific T-cell engager (BiTE) molecules, or CAR T therapy.

30. (canceled)

31. The method of claim 29, wherein the sepsis is bacterial sepsis, viral sepsis, fungal sepsis, or protozoan sepsis.

32.-35. (canceled)

36. A method of decreasing or inhibiting inflammation in a subject in need thereof, the method comprising:
administering to the subject an effective amount of an anti-Gal3 antibody or binding fragment thereof.

37. The method of claim 36, wherein the inflammation in the subject is associated with neutrophil activation and/or migration.

38. The method of claim 36 or 37, wherein administration of the effective amount of the anti-Gal3 antibody or binding fragment thereof decreases or inhibits neutrophil activation and/or migration in the subject, decreases or inhibits cleavage of CD62L expressed by neutrophils, decreases or inhibits IL-8 production in the subject, decreases the number of neutrophils in the subject, and/or modulates expression of Gal3, myeloperoxidase (MPO), growth-related oncogene α (GROα)/keratinocytes-derived chemokine (KC), Ly6c1, INOS, IL-6, TNFα, IL-1B, Col1A1, aSMA, TGFβ, VEGFA, VEGFB, or any combination thereof, in the subject.

39. (canceled)

40. The method of claim 36, further comprising detecting a decrease in neutrophil CD62L cleavage, a decrease in IL-8 production in the subject, a decrease in the number of neutrophils in the subject, or any combination thereof, a change in expression of Gal3, MPO, GROα/KC, Ly6c1, INOS, IL-6, TNFα, IL-1B, Col1A1, aSMA, TGFβ, VEGFA, VEGFB, or any combination thereof, in the subject, and/or an improvement in the inflammation in the subject, after the administering step.

41.-44. (canceled)

45. The method of claim 36, wherein administration of the effective amount of the anti-Gal3 antibody or binding fragment thereof decreases production of autoantibodies in the subject.

46. The method of claim 45, wherein the autoantibodies are anti-nucleic acid autoantibodies.

47. The method of claim 36, wherein the inflammation comprises lung inflammation, COPD, pneumonitis, asthma, sarcoidosis, pulmonary fibrosis, histiocytosis, bronchiolitis obliterans, or any combination thereof.

48. (canceled)

49. The method of claim 36, wherein the inflammation comprises an autoimmune disease, systemic lupus erythematosus (SLE), Graves' disease, rheumatoid arthritis, multiple sclerosis, Sjogren's syndrome, celiac disease, or any combination thereof.

50.-56. (canceled)

57. The method of claim 36, wherein the anti-Gal3 antibody or binding fragment thereof is specific for the N-terminus of Gal3, the N-terminal domain of Gal3, or the tandem repeat domain (TRD) of Gal3.

58.-60. (canceled)

61. The method of claim 36, wherein the anti-Gal3 antibody or binding fragment thereof binds to Peptide 1 (ADNFSLHDALSGSGNPNPQG; SEQ ID NO: 3), Peptide 6 (GAYPGQAPPGAYPGAPGAYP; SEQ ID NO: 8), or Peptide 7 (AYPGAPGAYPGAPAPGVYPG; SEQ ID NO: 9).

62.-63. (canceled)

64. The method of claim 36, wherein the anti-Gal3 antibody or binding fragment thereof comprises (1) a light chain variable region comprising a V_{L}-CDR1, a V_{L}-CDR2, and a V_{L}-CDR3; and (2) a heavy chain variable region comprising a V_{H}-CDR1, a V_{H}-CDR2, and a V_{H}-CDR3, wherein
the V_{L}-CDR1 comprises an amino acid sequence having at least 60%, at least 70%, at least 80%, at least 90%, or 100% sequence identity to any amino acid sequence according to SEQ ID NOs: 170-220,
the V_{L}-CDR2 comprises an amino acid sequence having at least 60%, at least 70%, at least 80%, at least 90%, or 100% sequence identity to any amino acid sequence according to SEQ ID NOs: 221-247,
the V_{L}-CDR3 comprises an amino acid sequence having at least 60%, at least 70%, at least 80%, at least 90%, or 100% sequence identity to any amino acid sequence according to SEQ ID NOs: 248-296,
the V_{H}-CDR1 comprises an amino acid sequence having at least 60%, at least 70%, at least 80%, at least 90%, or 100% sequence identity to any amino acid sequence according to SEQ ID NOs: 27-70,
the V_{H}-CDR2 comprises an amino acid sequence having at least 60%, at least 70%, at least 80%, at least 90%, or 100% sequence identity to any amino acid sequence according to SEQ ID NOs: 71-111, 826, and
the V_{H}-CDR3 comprises an amino acid sequence having at least 60%, at least 70%, at least 80%, at least 90%, or 100% sequence identity to any amino acid sequence according to SEQ ID NOs: 112-169, 827.

65.-190. (canceled)

191. The anti-Gal3 antibody or binding fragment thereof of claim 1, wherein the anti-Gal3 antibody or binding fragment is selected from the group consisting of: 849.5H1, 847.23F11, 847.16D10, 847.13E2-mH0mL1, 847.13E2-mH0mL2, 847.12C4, 847.4D3, 2D10-VH0-VL0, or binding fragment thereof.

192. The method of claim 36, wherein the anti-Gal3 antibody or binding fragment thereof is selected from the group consisting of: 849.5H1, 847.23F11, 847.16D10, 847.13E2-mH0mL1, 847.13E2-mH0mL2, 847.12C4, 847.4D3, 2D10-VH0-VL0, or binding fragment thereof.

The application's sequence listing, which the Patent Office published only in electronic form, follows.

SEQUENCE LISTING (839 sequences)

SEQ ID NO: 1 - protein, 250 aa, Homo sapiens [sequence omitted]

SEQ ID NO: 2 - protein, 264 aa, Homo sapiens
MHSKTPCGCFKPWKMADNFSLHDALSGSGNPNPQGWPGAWGNQPAGAGGYPGASYPGAYPGQAPPGAYPGQAPPGAYPGAPGAYPGAPAPGVYPGPPSGPGAYPSSGQPSATGAYPATGPYGAPAGPLIVPYNLPLPGGVVPRMLITILGTVKPNANRIALDFQRGNDVAFHFNPRFNENNRRVIVCNTKLDNNWGREERQSVFPFESGKPFKIQVLVEPDHFKVAVNDAHLLQYNHRVKKLNEISKLGISGDIDLTSASYTMI

SEQ ID NO: 3 - protein, 20 aa, Artificial Sequence
  Gal3 Peptide 1
ADNFSLHDALSGSGNPNPQG

SEQ ID NO: 4 - protein, 20 aa, Artificial Sequence
  Gal3 Peptide 2
SGSGNPNPQGWPGAWGNQPA

SEQ ID NO: 5 - protein, 20 aa, Artificial Sequence
  Gal3 Peptide 3
WPGAWGNQPAGAGGYPGASY

SEQ ID NO: 6 - protein, 20 aa, Artificial Sequence
  Gal3 Peptide 4
GAGGYPGASYPGAYPGQAPP

SEQ ID NO: 7 - protein, 20 aa, Artificial Sequence
  Gal3 Peptide 5
PGAYPGQAPPGAYPGQAPPG

SEQ ID NO: 8 - protein, 20 aa, Artificial Sequence
  Gal3 Peptide 6
GAYPGQAPPGAYPGAPGAYP

SEQ ID NO: 9 - protein, 20 aa, Artificial Sequence
  Gal3 Peptide 7
AYPGAPGAYPGAPAPGVYPG

SEQ ID NO: 10 - protein, 20 aa, Artificial Sequence
  Gal3 Peptide 8
GAPAPGVYPGPPSGPGAYPS

SEQ ID NO: 11 - protein, 20 aa, Artificial Sequence
  Gal3 Peptide 9
PPSGPGAYPSSGQPSATGAY

SEQ ID NO: 12 - protein, 20 aa, Artificial Sequence
  Gal3 Peptide 10
SGQPSATGAYPATGPYGAPA

SEQ ID NO: 13 - protein, 20 aa, Artificial Sequence
  Gal3 Peptide 11
PATGPYGAPAGPLIVPYNLP

SEQ ID NO: 14 - protein, 20 aa, Artificial Sequence
  Gal3 Peptide 12
GPLIVPYNLPLPGGVVPRML

SEQ ID NO: 15 - protein, 20 aa, Artificial Sequence
  Gal3 Peptide 13
LPGGVVPRMLITILGTVKPN

SEQ ID NO: 16 - protein, 20 aa, Artificial Sequence
  Gal3 Peptide 14
ITILGTVKPNANRIALDFQR

SEQ ID NO: 17 - protein, 20 aa, Artificial Sequence
  Gal3 Peptide 15
ANRIALDFQRGNDVAFHFNP

SEQ ID NO: 18 - protein, 20 aa, Artificial Sequence
  Gal3 Peptide 16
GNDVAFHFNPRFNENNRRVI

SEQ ID NO: 19 - protein, 20 aa, Artificial Sequence
  Gal3 Peptide 17
RFNENNRRVIVCNTKLDNNW

SEQ ID NO: 20 - protein, 20 aa, Artificial Sequence
  Gal3 Peptide 18
VCNTKLDNNWGREERQSVFP

SEQ ID NO: 21 - protein, 20 aa, Artificial Sequence
  Gal3 Peptide 19
GREERQSVFPFESGKPFKIQ

SEQ ID NO: 22 - protein, 20 aa, Artificial Sequence
  Gal3 Peptide 20
FESGKPFKIQVLVEPDHFKV

SEQ ID NO: 23 - protein, 20 aa, Artificial Sequence
  Gal3 Peptide 21
VLVEPDHFKVAVNDAHLLQY

SEQ ID NO: 24 - protein, 20 aa, Artificial Sequence
  Gal3 Peptide 22
AVNDAHLLQYNHRVKKLNEI

SEQ ID NO: 25 - protein, 20 aa, Artificial Sequence
  Gal3 Peptide 23
NHRVKKLNEISKLGISGDID

SEQ ID NO: 26 - protein, 19 aa, Artificial Sequence
  Gal3 Peptide 24
SKLGISGDIDLTSASYTMI

SEQ ID NO: 27 - protein, 7 aa, Artificial Sequence
  VH_CDR1_1
GYTFTNY

SEQ ID NO: 28 - protein, 7 aa, Artificial Sequence
  VH_CDR1_2
GFSLTSY

SEQ ID NO: 29 - protein, 8 aa, Artificial Sequence
  VH_CDR1_3
GYTFTNYW

SEQ ID NO: 30 - protein, 8 aa, Artificial Sequence
  VH_CDR1_4
GYTFTNYG

SEQ ID NO: 31 - protein, 7 aa, Artificial Sequence
  VH_CDR1_5
GYSFTNY

SEQ ID NO: 32 - protein, 7 aa, Artificial Sequence
  VH_CDR1_6
GYTFTDY

SEQ ID NO: 33 - protein, 7 aa, Artificial Sequence
  VH_CDR1_7
GYKFKTY

SEQ ID NO: 34 - protein, 7 aa, Artificial Sequence
  VH_CDR1_8
GYTFTTY

SEQ ID NO: 35 - protein, 7 aa, Artificial Sequence
  VH_CDR1_9
GFAFSSY

SEQ ID NO: 36 - protein, 7 aa, Artificial Sequence
  VH_CDR1_10
GYTFTDF

SEQ ID NO: 37 - protein, 7 aa, Artificial Sequence
  VH_CDR1_11
GYAFTTY

SEQ ID NO: 38 - protein, 7 aa, Artificial Sequence
  VH_CDR1_12
GFTFSSY

SEQ ID NO: 39 - protein, 8 aa, Artificial Sequence
  VH_CDR1_13
GFSLTSYG

SEQ ID NO: 40 - protein, 7 aa, Artificial Sequence
  VH_CDR1_14
GYTFTSY

SEQ ID NO: 41 - protein, 7 aa, Artificial Sequence
  VH_CDR1_15
GYTFSDY

SEQ ID NO: 42 - protein, 8 aa, Artificial Sequence
  VH_CDR1_16
GYTFTNFG

SEQ ID NO: 43 - protein, 8 aa, Artificial Sequence
  VH_CDR1_17
GFTFSSYA

SEQ ID NO: 44 - protein, 10 aa, Artificial Sequence
  VH_CDR1_18
GFSLSTSGMG

SEQ ID NO: 45 - protein, 8 aa, Artificial Sequence
  VH_CDR1_19
GFTFSNYG

SEQ ID NO: 46 - protein, 8 aa, Artificial Sequence
  VH_CDR1_20
GYIFTNYG

SEQ ID NO: 47 - protein, 8 aa, Artificial Sequence
  VH_CDR1_21
GNTFTDHN

SEQ ID NO: 48 - protein, 8 aa, Artificial Sequence
  VH_CDR1_22
GYTFTSYW

SEQ ID NO: 49 - protein, 10 aa, Artificial Sequence
  VH_CDR1_23
GFSLSTFGMG

SEQ ID NO: 50 - protein, 8 aa, Artificial Sequence
  VH_CDR1_24
GYTFTSYD

SEQ ID NO: 51 - protein, 8 aa, Artificial Sequence
  VH_CDR1_25
GFTFSNYW

SEQ ID NO: 52 - protein, 8 aa, Artificial Sequence
  VH_CDR1_26
GYTFTSYV

SEQ ID NO: 53 - protein, 8 aa, Artificial Sequence
  VH_CDR1_27
GYSFTNYI

SEQ ID NO: 54 - protein, 8 aa, Artificial Sequence
  VH_CDR1_28
GYTFRSYD

SEQ ID NO: 55 - protein, 8 aa, Artificial Sequence
  VH_CDR1_29
GFTFSNFW

SEQ ID NO: 56 - protein, 8 aa, Artificial Sequence
  VH_CDR1_30
EYAFNNYM

SEQ ID NO: 57 - protein, 8 aa, Artificial Sequence
  VH_CDR1_31
GYSFTGYT

SEQ ID NO: 58 - protein, 8 aa, Artificial Sequence
  VH_CDR1_32
GFSLINYG

SEQ ID NO: 59 - protein, 8 aa, Artificial Sequence
  VH_CDR1_33
GYTFNNYW

SEQ ID NO: 60 - protein, 8 aa, Artificial Sequence
  VH_CDR1_34
GFSLSSYG

SEQ ID NO: 61 - protein, 8 aa, Artificial Sequence
  VH_CDR1_35
GYSFTNYW

SEQ ID NO: 62 - protein, 8 aa, Artificial Sequence
  VH_CDR1_36
GYSFTSYW

SEQ ID NO: 63 - protein, 9 aa, Artificial Sequence
  VH_CDR1_37
GYSITSGYY

SEQ ID NO: 64 - protein, 8 aa, Artificial Sequence
  VH_CDR1_38
GFNIKDYY

SEQ ID NO: 65 - protein, 8 aa, Artificial Sequence
  VH_CDR1_39
RYTFTDYN

SEQ ID NO: 66 - protein, 8 aa, Artificial Sequence
  VH_CDR1_40
GYTFTIFG

SEQ ID NO: 67 - protein, 8 aa, Artificial Sequence
  VH_CDR1_41
GYTFTSSW

SEQ ID NO: 68 - protein, 8 aa, Artificial Sequence
  VH_CDR1_42
GYTFTGYW

SEQ ID NO: 69 - protein, 8 aa, Artificial Sequence
  VH_CDR1_43
GYSFTDYN

SEQ ID NO: 70 - protein, 8 aa, Artificial Sequence
  VH_CDR1_44
GFSLTIYG

SEQ ID NO: 71 - protein, 6 aa, Artificial Sequence
  VH_CDR2_1
NTNTGE

SEQ ID NO: 72 - protein, 8 aa, Artificial Sequence
  VH_CDR2_2
IYPGSGNT

SEQ ID NO: 73 - protein, 8 aa, Artificial Sequence
  VH_CDR2_3
IYPGTGNT

SEQ ID NO: 74 - protein, 8 aa, Artificial Sequence
  VH_CDR2_4
INTYSGVP

SEQ ID NO: 75 - protein, 8 aa, Artificial Sequence
  VH_CDR2_5
ISDGGVYT

SEQ ID NO: 76 - protein, 8 aa, Artificial Sequence
  VH_CDR2_6
INPKNGGI

SEQ ID NO: 77 - protein, 8 aa, Artificial Sequence
  VH_CDR2_7
VNTYSGVP

SEQ ID NO: 78 - protein, 8 aa, Artificial Sequence
  VH_CDR2_8
IYPGSNDT

SEQ ID NO: 79 - protein, 8 aa, Artificial Sequence
  VH_CDR2_9
ISDGGIYT

SEQ ID NO: 80 - protein, 8 aa, Artificial Sequence
  VH_CDR2_10
INTHSGVP

SEQ ID NO: 81 - protein, 7 aa, Artificial Sequence
  VH_CDR2_11
IWSGGST

SEQ ID NO: 82 - protein, 8 aa, Artificial Sequence
  VH_CDR2_12
IDPSDSET

SEQ ID NO: 83 - protein, 8 aa, Artificial Sequence
  VH_CDR2_13
IHPNSGST

SEQ ID NO: 84 - protein, 8 aa, Artificial Sequence
  VH_CDR2_14
INPNNGGT

SEQ ID NO: 85 - protein, 8 aa, Artificial Sequence
  VH_CDR2_15
IYPVSVNT

SEQ ID NO: 86 - protein, 8 aa, Artificial Sequence
  VH_CDR2_16
INTYTGEP

SEQ ID NO: 87 - protein, 7 aa, Artificial Sequence
  VH_CDR2_17
ISSGGDT

SEQ ID NO: 88 - protein, 7 aa, Artificial Sequence
  VH_CDR2_18
IWWDDDK

SEQ ID NO: 89 - protein, 8 aa, Artificial Sequence
  VH_CDR2_19
ISSGGSYT

SEQ ID NO: 90 - protein, 8 aa, Artificial Sequence
  VH_CDR2_20
IYPYNGGT

SEQ ID NO: 91 - protein, 7 aa, Artificial Sequence
  VH_CDR2_21
ISSGGST

SEQ ID NO: 92 - protein, 8 aa, Artificial Sequence
  VH_CDR2_22
IYPGSSSI

SEQ ID NO: 93 - protein, 8 aa, Artificial Sequence
  VH_CDR2_23
IYPGDGST

SEQ ID NO: 94 - protein, 10 aa, Artificial Sequence
  VH_CDR2_24
IRLKSNNYAT

SEQ ID NO: 95 - protein, 8 aa, Artificial Sequence
  VH_CDR2_25
INTNTGES

SEQ ID NO: 96 - protein, 10 aa, Artificial Sequence
  VH_CDR2_26
LRLKSNNYAT

SEQ ID NO: 97 - protein, 8 aa, Artificial Sequence
  VH_CDR2_27
INPYNDGT

SEQ ID NO: 98 - protein, 8 aa, Artificial Sequence
  VH_CDR2_28
IFPGEGIS

SEQ ID NO: 99 - protein, 8 aa, Artificial Sequence
  VH_CDR2_29
IFPGDGTT

SEQ ID NO: 100 - protein, 8 aa, Artificial Sequence
  VH_CDR2_30
INPGSGAT

SEQ ID NO: 101 - protein, 8 aa, Artificial Sequence
  VH_CDR2_31
INPYNGGT

SEQ ID NO: 102 - protein, 8 aa, Artificial Sequence
  VH_CDR2_32
FLPGDGSS

SEQ ID NO: 103 - protein, 7 aa, Artificial Sequence
  VH_CDR2_33
IWAGGST

SEQ ID NO: 104 - protein, 8 aa, Artificial Sequence
  VH_CDR2_34
INTNTGEP

SEQ ID NO: 105 - protein, 7 aa, Artificial Sequence
  VH_CDR2_35
ISYDGRN

SEQ ID NO: 106 - protein, 8 aa, Artificial Sequence
  VH_CDR2_36
IYPEDDET

SEQ ID NO: 107 - protein, 8 aa, Artificial Sequence
  VH_CDR2_37
IYPNNGGT

SEQ ID NO: 108 - protein, 8 aa, Artificial Sequence
  VH_CDR2_38
VNTYTGEP

SEQ ID NO: 109 - protein, 8 aa, Artificial Sequence
  VH_CDR2_39
IDPYNDAT

SEQ ID NO: 110 - protein, 7 aa, Artificial Sequence
  VH_CDR2_40
VAWDDKK

SEQ ID NO: 111 - protein, 7 aa, Artificial Sequence
  VH_CDR2_41
ISSGDSP

SEQ ID NO: 112 - protein, 9 aa, Artificial Sequence
  VH_CDR3_1
APYDNFFAY

SEQ ID NO: 113 - protein, 9 aa, Artificial Sequence
  VH_CDR3_2
STAPGGFDV

SEQ ID NO: 114 - protein, 15 aa, Artificial Sequence
  VH_CDR3_3
ARFAYYYGSGGYFDY

SEQ ID NO: 115 - protein, 12 aa, Artificial Sequence
  VH_CDR3_4
ARDGNYGDPMDY

SEQ ID NO: 116 - protein, 10 aa, Artificial Sequence
  VH_CDR3_5
STPYEYDGAY

SEQ ID NO: 117 - protein, 6 aa, Artificial Sequence
  VH_CDR3_6
VRDGGY

SEQ ID NO: 118 - protein, 9 aa, Artificial Sequence
  VH_CDR3_7
ARGPYAMDY

SEQ ID NO: 119 - protein, 8 aa, Artificial Sequence
  VH_CDR3_8
TSGYGFPY

SEQ ID NO: 120 - protein, 13 aa, Artificial Sequence
  VH_CDR3_9
ANYFGCSGWFFDV

SEQ ID NO: 121 - protein, 12 aa, Artificial Sequence
  VH_CDR3_10
TRDGNDGDAMDN

SEQ ID NO: 122 - protein, 14 aa, Artificial Sequence
  VH_CDR3_11
AKGPYDYDLGWFAY

SEQ ID NO: 123 - protein, 8 aa, Artificial Sequence
  VH_CDR3_12
ARHGYYDY

SEQ ID NO: 124 - protein, 12 aa, Artificial Sequence
  VH_CDR3_13
TRWGIYYYARDY

SEQ ID NO: 125 - protein, 10 aa, Artificial Sequence
  VH_CDR3_14
AVPYEYDGAY

SEQ ID NO: 126 - protein, 10 aa, Artificial Sequence
  VH_CDR3_15
ATPYEYDGAY

SEQ ID NO: 127 - protein, 5 aa, Artificial Sequence
  VH_CDR3_16
AYLDY

SEQ ID NO: 128 - protein, 14 aa, Artificial Sequence
  VH_CDR3_17
AKSPDGYDVAWFGY

SEQ ID NO: 129 - protein, 15 aa, Artificial Sequence
  VH_CDR3_18
ARWGGYAGDYYAMDF

SEQ ID NO: 130 - protein, 15 aa, Artificial Sequence
  VH_CDR3_19
ARWGGYDGDYYAMDY

SEQ ID NO: 131 - protein, 15 aa, Artificial Sequence
  VH_CDR3_20
ARWGGYAGDYYAMDY

SEQ ID NO: 132 - protein, 10 aa, Artificial Sequence
  VH_CDR3_21
ASYGNSLFDY

SEQ ID NO: 133 - protein, 7 aa, Artificial Sequence
  VH_CDR3_22
VRYTMDY

SEQ ID NO: 134 - protein, 16 aa, Artificial Sequence
  VH_CDR3_23
ARNLYDGSYGYYAMDY

SEQ ID NO: 135 - protein, 16 aa, Artificial Sequence
  VH_CDR3_24
ARHAHYYGVSPYYFDY

SEQ ID NO: 136 - protein, 12 aa, Artificial Sequence
  VH_CDR3_25
AKFGNYVGAMDY

SEQ ID NO: 137 - protein, 13 aa, Artificial Sequence
  VH_CDR3_26
ARGEYDYLAWFAY

SEQ ID NO: 138 - protein, 11 aa, Artificial Sequence
  VH_CDR3_27
TRFTTVVEMDY

SEQ ID NO: 139 - protein, 5 aa, Artificial Sequence
  VH_CDR3_28
ARWGY

SEQ ID NO: 140 - protein, 13 aa, Artificial Sequence
  VH_CDR3_29
ARIDYGDYVGFAY

SEQ ID NO: 141 - protein, 11 aa, Artificial Sequence
  VH_CDR3_30
AREAASNAMDY

SEQ ID NO: 142 - protein, 13 aa, Artificial Sequence
  VH_CDR3_31
TRHYGFPYWYFDV

SEQ ID NO: 143 - protein, 11 aa, Artificial Sequence
  VH_CDR3_32
QPGGVTGTLTT

SEQ ID NO: 144 - protein, 7 aa, Artificial Sequence
  VH_CDR3_33
ARYPMDY

SEQ ID NO: 145 - protein, 11 aa, Artificial Sequence
  VH_CDR3_34
ARLLFYYAMDY

SEQ ID NO: 146 - protein, 11 aa, Artificial Sequence
  VH_CDR3_35
AREATAGAMDY

SEQ ID NO: 147 - protein, 11 aa, Artificial Sequence
  VH_CDR3_36
AREGAGSWFAY

SEQ ID NO: 148 - protein, 7 aa, Artificial Sequence
  VH_CDR3_37
TYNDLGY

SEQ ID NO: 149 - protein, 16 aa, Artificial Sequence
  VH_CDR3_38
ARKDDYYGSSPYALDY

SEQ ID NO: 150 - protein, 9 aa, Artificial Sequence
  VH_CDR3_39
VRDDYDSDY

SEQ ID NO: 151 - protein, 14 aa, Artificial Sequence
  VH_CDR3_40
ARIYYYGRGYAMDY

SEQ ID NO: 152 - protein, 15 aa, Artificial Sequence
  VH_CDR3_41
ARGDYYYGTRGPMDY

SEQ ID NO: 153 - protein, 8 aa, Artificial Sequence
  VH_CDR3_42
ARWGAMDY

SEQ ID NO: 154 - protein, 15 aa, Artificial Sequence
  VH_CDR3_43
ARDRASLLRPGAMDY

SEQ ID NO: 155 - protein, 11 aa, Artificial Sequence
  VH_CDR3_44
ARLDYDYDEDY

SEQ ID NO: 156 - protein, 14 aa, Artificial Sequence
  VH_CDR3_45
ASPPSGYDYDVFAS

SEQ ID NO: 157 - protein, 14 aa, Artificial Sequence
  VH_CDR3_46
ASPPSGYDYDVFAY

SEQ ID NO: 158 - protein, 14 aa, Artificial Sequence
  VH_CDR3_47
AKPPYDYDGAWFAY

SEQ ID NO: 159 - protein, 7 aa, Artificial Sequence
  VH_CDR3_48
ATGRPDY

SEQ ID NO: 160 - protein, 7 aa, Artificial Sequence
  VH_CDR3_49
AKGRPDY

SEQ ID NO: 161 - protein, 11 aa, Artificial Sequence
  VH_CDR3_50
AGYDFLWYFDV

SEQ ID NO: 162 - protein, 12 aa, Artificial Sequence
  VH_CDR3_51
ARSGGYYVWFAY

SEQ ID NO: 163 - protein, 14 aa, Artificial Sequence
  VH_CDR3_52
ARSYYDGSYDAMDY

SEQ ID NO: 164 - protein, 7 aa, Artificial Sequence
  VH_CDR3_53
ARGWFAY

SEQ ID NO: 165 - protein, 14 aa, Artificial Sequence
  VH_CDR3_54
AKPPHDYDQAWFAY

SEQ ID NO: 166 - protein, 9 aa, Artificial Sequence
  VH_CDR3_55
VNSNYESGY

SEQ ID NO: 167 - protein, 9 aa, Artificial Sequence
  VH_CDR3_56
ANSNYASGS

SEQ ID NO: 168 - protein, 13 aa, Artificial Sequence
  VH_CDR3_57
ARWGRYEYYAMDY

SEQ ID NO: 169 - protein, 9 aa, Artificial Sequence
  VH_CDR3_58
TMTGGPINY

SEQ ID NO: 170 - protein, 16 aa, Artificial Sequence
  VL-CDR1_1
RSSKSLLYKDGKTYLN

SEQ ID NO: 171 - protein, 11 aa, Artificial Sequence
  VL-CDR1_2
KSLLHSDGITY

SEQ ID NO: 172 - protein, 6 aa, Artificial Sequence
  VL-CDR1_3
QGINSN

SEQ ID NO: 173 - protein, 11 aa, Artificial Sequence
  VL-CDR1_4
QSLLYTNGKTY

SEQ ID NO: 174 - protein, 11 aa, Artificial Sequence
  VL-CDR1_5
QSLFDSDGKTY

SEQ ID NO: 175 - protein, 11 aa, Artificial Sequence
  VL-CDR1_6
QSIVHNNGNTY

SEQ ID NO: 176 - protein, 6 aa, Artificial Sequence
  VL-CDR1_7
QGINNY

SEQ ID NO: 177 - protein, 6 aa, Artificial Sequence
  VL-CDR1_8
QNIYIW

SEQ ID NO: 178 - protein, 6 aa, Artificial Sequence
  VL-CDR1_9
QDISNY

SEQ ID NO: 179 - protein, 11 aa, Artificial Sequence
  VL-CDR1_10
QSIVHSNGNTY

SEQ ID NO: 180 - protein, 11 aa, Artificial Sequence
  VL-CDR1_11
QSLLYTDGKTY

SEQ ID NO: 181 - protein, 6 aa, Artificial Sequence
  VL-CDR1_12
QSVSND

SEQ ID NO: 182 - protein, 6 aa, Artificial Sequence
  VL-CDR1_13
QGISNY

SEQ ID NO: 183 - protein, 6 aa, Artificial Sequence
  VL-CDR1_14
QDVSTA

SEQ ID NO: 184 - protein, 6 aa, Artificial Sequence
  VL-CDR1_15
QNVGTN

SEQ ID NO: 185 - protein, 11 aa, Artificial Sequence
  VL-CDR1_16
QSLFHSDGKTY

SEQ ID NO: 186 - protein, 6 aa, Artificial Sequence
  VL-CDR1_17
QNINIW

SEQ ID NO: 187 - protein, 11 aa, Artificial Sequence
  VL-CDR1_18
QSLLHSDGKTY

SEQ ID NO: 188 - protein, 6 aa, Artificial Sequence
  VL-CDR1_19
QDVRTA

SEQ ID NO: 189 - protein, 12 aa, Artificial Sequence
  VL-CDR1_20
QSVLYSSNQKNY

SEQ ID NO: 190 - protein, 12 aa, Artificial Sequence
  VL-CDR1_21
QSVLYSSSQKNY

SEQ ID NO: 191 - protein, 11 aa, Artificial Sequence
  VL-CDR1_22
QSLVHNSGNTY

SEQ ID NO: 192 - protein, 9 aa, Artificial Sequence
  VL-CDR1_23
TGAVTTSNY

SEQ ID NO: 193 - protein, 11 aa, Artificial Sequence
  VL-CDR1_24
KSLLHTNGITF

SEQ ID NO: 194 - protein, 12 aa, Artificial Sequence
  VL-CDR1_25
QSLLNSSNQKNY

SEQ ID NO: 195 - protein, 6 aa, Artificial Sequence
  VL-CDR1_26
QNINVW

SEQ ID NO: 196 - protein, 6 aa, Artificial Sequence
  VL-CDR1_27
IDIDDD

SEQ ID NO: 197 - protein, 11 aa, Artificial Sequence
  VL-CDR1_28
QDIVHSSGNTY

SEQ ID NO: 198 - protein, 11 aa, Artificial Sequence
  VL-CDR1_29
KSLLYSNGITY

SEQ ID NO: 199 - protein, 10 aa, Artificial Sequence
  VL-CDR1_30
KSVSTSGYSY

SEQ ID NO: 200 - protein, 10 aa, Artificial Sequence
  VL-CDR1_31
ESVDSYGNSF

SEQ ID NO: 201 - protein, 11 aa, Artificial Sequence
  VL-CDR1_32
QSLLYSNGKTY

SEQ ID NO: 202 - protein, 6 aa, Artificial Sequence
  VL-CDR1_33
QGISSN

SEQ ID NO: 203 - protein, 10 aa, Artificial Sequence
  VL-CDR1_34
KSVSTSGYSC

SEQ ID NO: 204 - protein, 11 aa, Artificial Sequence
  VL-CDR1_35
QSLLYSDGKTY

SEQ ID NO: 205 - protein, 10 aa, Artificial Sequence
  VL-CDR1_36
ESVENHVNSF

SEQ ID NO: 206 - protein, 5 aa, Artificial Sequence
  VL-CDR1_37
SSVTY

SEQ ID NO: 207 - protein, 10 aa, Artificial Sequence
  VL-CDR1_38
ESLDNSGISF

SEQ ID NO: 208 - protein, 6 aa, Artificial Sequence
  VL-CDR1_39
QDVSTT

SEQ ID NO: 209 - protein, 6 aa, Artificial Sequence
  VL-CDR1_40
QNVGIN

SEQ ID NO: 210 - protein, 11 aa, Artificial Sequence
  VL-CDR1_41
QSLLDSDGKTY

SEQ ID NO: 211 - protein, 6 aa, Artificial Sequence
  VL-CDR1_42
GNIHNY

SEQ ID NO: 212 - protein, 6 aa, Artificial Sequence
  VL-CDR1_43
QSVSSD

SEQ ID NO: 213 - protein, 11 aa, Artificial Sequence
  VL-CDR1_44
QSLLYINGKTY

SEQ ID NO: 214 - protein, 11 aa, Artificial Sequence
  VL-CDR1_45
RSLLHSNGYTY

SEQ ID NO: 215 - protein, 11 aa, Artificial Sequence
  VL-CDR1_46
RSLLDSDGKTY

SEQ ID NO: 216 - protein, 6 aa, Artificial Sequence
  VL-CDR1_47
QDVSSV

SEQ ID NO: 217 - protein, 6 aa, Artificial Sequence
  VL-CDR1_48
QIINNN

SEQ ID NO: 218 - protein, 10 aa, Artificial Sequence
  VL-CDR1_49
KSVTTSAYSY

SEQ ID NO: 219 - protein, 11 aa, Artificial Sequence
  VL-CDR1_50
QSLLDRDGKTY

SEQ ID NO: 220 - protein, 6 aa, Artificial Sequence
  VL-CDR1_51
QSVSNE

SEQ ID NO: 221 - protein, 7 aa, Artificial Sequence
  VL-CDR2_1
LMSTHAS

SEQ ID NO: 222 - protein, 3 aa, Artificial Sequence
  VL-CDR2_2
RMS

SEQ ID NO: 223 - protein, 3 aa, Artificial Sequence
  VL-CDR2_3
HAT

SEQ ID NO: 224 - protein, 3 aa, Artificial Sequence
  VL-CDR2_4
LLS

SEQ ID NO: 225 - protein, 3 aa, Artificial Sequence
  VL-CDR2_5
LVS

SEQ ID NO: 226 - protein, 3 aa, Artificial Sequence
  VL-CDR2_6
KVS

SEQ ID NO: 227 - protein, 3 aa, Artificial Sequence
  VL-CDR2_7
YAS

SEQ ID NO: 228 - protein, 3 aa, Artificial Sequence
  VL-CDR2_8
KAS

SEQ ID NO: 229 - protein, 3 aa, Artificial Sequence
  VL-CDR2_9
YTS

SEQ ID NO: 230 - protein, 3 aa, Artificial Sequence
  VL-CDR2_10
WAS

SEQ ID NO: 231 - protein, 3 aa, Artificial Sequence
  VL-CDR2_11
GAS

SEQ ID NO: 232 - protein, 3 aa, Artificial Sequence
  VL-CDR2_12
GIN

SEQ ID NO: 233 - protein, 3 aa, Artificial Sequence
  VL-CDR2_13
QMS

SEQ ID NO: 234 - protein, 3 aa, Artificial Sequence
  VL-CDR2_14
FAS

SEQ ID NO: 235 - protein, 3 aa, Artificial Sequence
  VL-CDR2_15
EGN

SEQ ID NO: 236 - protein, 3 aa, Artificial Sequence
  VL-CDR2_16
GTN

SEQ ID NO: 237 - protein, 3 aa, Artificial Sequence
  VL-CDR2_17
LAS

SEQ ID NO: 238 - protein, 3 aa, Artificial Sequence
  VL-CDR2_18
LVC

SEQ ID NO: 239 - protein, 3 aa, Artificial Sequence
  VL-CDR2_19
HGT

SEQ ID NO: 240 - protein, 3 aa, Artificial Sequence
  VL-CDR2_20
YGT

SEQ ID NO: 241 - protein, 3 aa, Artificial Sequence
  VL-CDR2_21
RAS

SEQ ID NO: 242 - protein, 3 aa, Artificial Sequence
  VL-CDR2_22
ATS

SEQ ID NO: 243 - protein, 3 aa, Artificial Sequence
  VL-CDR2_23
AAS

SEQ ID NO: 244 - protein, 3 aa, Artificial Sequence
  VL-CDR2_24
SAS

SEQ ID NO: 245 - protein, 3 aa, Artificial Sequence
  VL-CDR2_25
NVK

SEQ ID NO: 246 - protein, 3 aa, Artificial Sequence
  VL-CDR2_26
SAK

SEQ ID NO: 247 - protein, 3 aa, Artificial Sequence
  VL-CDR2_27
QAS

SEQ ID NO: 248 - protein, 9 aa, Artificial Sequence
  VL-CDR3_1
QQLVDYPLT

SEQ ID NO: 249 - protein, 9 aa, Artificial Sequence
  VL-CDR3_2
AQMLEFPLT

SEQ ID NO: 250 - protein, 9 aa, Artificial Sequence
  VL-CDR3_3
VQYAQFPPT

SEQ ID NO: 251 - protein, 9 aa, Artificial Sequence
  VL-CDR3_4
LQSTHFPLT

SEQ ID NO: 252 - protein, 9 aa, Artificial Sequence
  VL-CDR3_5
WQGTHFPLT

SEQ ID NO: 253 - protein, 9 aa, Artificial Sequence
  VL-CDR3_6
FQGSHVPLT

SEQ ID NO: 254 - protein, 9 aa, Artificial Sequence
  VL-CDR3_7
QQYSQVPYT

SEQ ID NO: 255 - protein, 9 aa, Artificial Sequence
  VL-CDR3_8
LQGQSYPLT

SEQ ID NO: 256 - protein, 9 aa, Artificial Sequence
  VL-CDR3_9
QQYSKLPYT

SEQ ID NO: 257 - protein, 9 aa, Artificial Sequence
  VL-CDR3_10
AQMIEFPLT

SEQ ID NO: 258 - protein, 9 aa, Artificial Sequence
  VL-CDR3_11
QQDYTSPYT

SEQ ID NO: 259 - protein, 9 aa, Artificial Sequence
  VL-CDR3_12
QQYSELPYT

SEQ ID NO: 260 - protein, 9 aa, Artificial Sequence
  VL-CDR3_13
QQHYTTPLT

SEQ ID NO: 261 - protein, 9 aa, Artificial Sequence
  VL-CDR3_14
EQYSNFPLT

SEQ ID NO: 262 - protein, 9 aa, Artificial Sequence
  VL-CDR3_15
QQYSSYPWT

SEQ ID NO: 263 - protein, 8 aa, Artificial Sequence
  VL-CDR3_16
HQYLSSLT

SEQ ID NO: 264 - protein, 9 aa, Artificial Sequence
  VL-CDR3_17
SQSTHVPPT

SEQ ID NO: 265 - protein, 9 aa, Artificial Sequence
  VL-CDR3_18
ALWYSNHWV

SEQ ID NO: 266 - protein, 9 aa, Artificial Sequence
  VL-CDR3_19
AQNLELPWT

SEQ ID NO: 267 - protein, 9 aa, Artificial Sequence
  VL-CDR3_20
QQHYSTPYT

SEQ ID NO: 268 - protein, 9 aa, Artificial Sequence
  VL-CDR3_21
QQGQSYPYT

SEQ ID NO: 269 - protein, 9 aa, Artificial Sequence
  VL-CDR3_22
LQSDNKPLT

SEQ ID NO: 270 - protein, 9 aa, Artificial Sequence
  VL-CDR3_23
ALWYSNHLV

SEQ ID NO: 271 - protein, 9 aa, Artificial Sequence
  VL-CDR3_24
FQGSHVPPT

SEQ ID NO: 272 - protein, 9 aa, Artificial Sequence
  VL-CDR3_25
QHSRELPLT

SEQ ID NO: 273 - protein, 9 aa, Artificial Sequence
  VL-CDR3_26
QQNNEDPWT

SEQ ID NO: 274 - protein, 9 aa, Artificial Sequence
  VL-CDR3_27
VQGTHFPQT

SEQ ID NO: 275 - protein, 9 aa, Artificial Sequence
  VL-CDR3_28
VQYDQFPWT

SEQ ID NO: 276 - protein, 9 aa, Artificial Sequence
  VL-CDR3_29
HHSTELPYT

SEQ ID NO: 277 - protein, 8 aa, Artificial Sequence
  VL-CDR3_30
VQGTHLPT

SEQ ID NO: 278 - protein, 9 aa, Artificial Sequence
  VL-CDR3_31
QQNNEVPYT

SEQ ID NO: 279 - protein, 9 aa, Artificial Sequence
  VL-CDR3_32
QQWSSNPLT

SEQ ID NO: 280 - protein, 9 aa, Artificial Sequence
  VL-CDR3_33
QHSKEVPWT

SEQ ID NO: 281 - protein, 9 aa, Artificial Sequence
  VL-CDR3_34
QQHYSPPFT

SEQ ID NO: 282 - protein, 9 aa, Artificial Sequence
  VL-CDR3_35
QQYNSYPYT

SEQ ID NO: 283 - protein, 9 aa, Artificial Sequence
  VL-CDR3_36
WQGTHFPFT

SEQ ID NO: 284 - protein, 9 aa, Artificial Sequence
  VL-CDR3_37
QHFWSIFPT

SEQ ID NO: 285 - protein, 9 aa, Artificial Sequence
  VL-CDR3_38
QHFWSLFPT

SEQ ID NO: 286 - protein, 9 aa, Artificial Sequence
  VL-CDR3_39
QHNYISPFT

SEQ ID NO: 287 - protein, 9 aa, Artificial Sequence
  VL-CDR3_40
QQHYNTPYT

SEQ ID NO: 288 - protein, 9 aa, Artificial Sequence
  VL-CDR3_41
LQSTHFPQT

SEQ ID NO: 289 - protein, 9 aa, Artificial Sequence
  VL-CDR3_42
MQHLEYPYT

SEQ ID NO: 290 - protein, 9 aa, Artificial Sequence
  VL-CDR3_43
QQYSKLPRT

SEQ ID NO: 291 - protein, 9 aa, Artificial Sequence
  VL-CDR3_44
WQGTHFPQT

SEQ ID NO: 292 - protein, 9 aa, Artificial Sequence
  VL-CDR3_45
QQGQSSPFT

SEQ ID NO: 293 - protein, 9 aa, Artificial Sequence
  VL-CDR3_46
QQTNSWPLT

SEQ ID NO: 294 - protein, 9 aa, Artificial Sequence
  VL-CDR3_47
QHNRELPPT

SEQ ID NO: 295 - protein, 8 aa, Artificial Sequence
  VL-CDR3_48
WQGTHFPT

SEQ ID NO: 296 - protein, 9 aa, Artificial Sequence
  VL-CDR3_49
QQHYSSPWT

SEQ ID NO: 297 - protein, 116 aa, Artificial Sequence
  VH-1 Peptide Sequence
QVQLVQSGSELKKPGASVKVSCKASGYTFTNYGMNWVRQAPGQGLKWMGWINTNTGEPTYVEEFTGRFVFSLETSVSTAYLQISSLKAEDTAVYFCAPYDNFFAYWGQGTTVTVSS

SEQ ID NO: 298 - protein, 116 aa, Artificial Sequence
  VH-2 Peptide Sequence
QVQLVQSGAEVKKPGASVKVSCKASGYSFTNYYMHWVRQAPGQRLEWMGWIYPGSGNTNYNEKFQGRVTITADTSASTAYMELSSLRSEDTAVYYCSTAPGGFDVWGQGTTVTVSS

SEQ ID NO: 299 - protein, 122 aa, Artificial Sequence
  VH-3 Peptide Sequence
QVQLKQSGAELVRPGASVKLSCKASGYTFTDYYINWVKQRPGQGLEWIARIYPGTGNTDYNEKFKGRATLTAEKSSSTAYMQLSSLTSEDSAVYFCARFAYYYGSGGYFDYWGHGTTLTVSS

SEQ ID NO: 300 - protein, 119 aa, Artificial Sequence
  VH-4 Peptide Sequence
QIQLVQSGPELKKPGETVKISCKTSGYKFKTYVMSWVKQAPGKALKWMGWINTYSGVPTYADDFKGRFAFSLETSASTAYLEIINLKNEDTATYFCARDGNYGDPMDYWGQGTSVTVSS

SEQ ID NO: 301 - protein, 117 aa, Artificial Sequence
  VH-5 Peptide Sequence
QIQLVQSGPELKKPGETVKISCKASGYTFTTYGMGWVKQAPGKDLKWMGWINTYSGVPTYADDFKGRFAFSLETSASTAYLQISNLKNEDTATYFCSTPYEYDGAYWGQGTLVTVSA

SEQ ID NO: 302 - protein, 113 aa, Artificial Sequence
  VH-6 Peptide Sequence
EVQLVESGGGLVKPGGSLKLSCAASGFAFSSYAMSWVRQTPEKRLEWVATISDGGVYTYYTDHVKGRFTISRDNAEDNLYLQMSHLKSEDTAMYYCVRDGGYWGQGTTLTVSS

SEQ ID NO: 303 - protein, 116 aa, Artificial Sequence
  VH-7 Peptide Sequence
QIQLVQSGPELKKPGETVKISCKASGYTFTTYAMSWVKQAPGKGLKWMGWINTYSGVPTYADDLKGRFAFSLETSASTAYLQINNLKNEDTATYFCARGPYAMDYWGQGTSVTVSS

SEQ ID NO: 304 - protein, 115 aa, Artificial Sequence
  VH-8 Peptide Sequence
EVQLQQSGPELVKPGASVKISCKASGYTFTDFYINWVKQSHGKSLEWIGDINPKNGGINYNPKFKIKATLTVDKSSSTSYMDLRGLTSEDSAVYYCTSGYGFPYWGQGTLVTVSA

SEQ ID NO: 305 - protein, 116 aa, Artificial Sequence
  VH-9 Peptide Sequence
QIQLVQSGPELKKPGESVKISCKASGYAFTTYGMSWVQQAPGKGLKWMGWVNTYSGVPTCADDFKGRFAFSLETSASTAYLQINNLRNEDTATYFCARGPYAMDYWGQGTSVTVSS

SEQ ID NO: 306 - protein, 120 aa, Artificial Sequence
  VH-10 Peptide Sequence
QVQLQQSGPELVKPGASVKISCKASGYTFTDYYINWVKQRPGQGLEWIGWIYPGSNDTKYNEKFKGKATLTVDTSSSTAYMQLGSLTSEDSAVYFCANYFGCSGWFFDVWGTGTTVTVSS

SEQ ID NO: 307 - protein, 113 aa, Artificial Sequence
  VH-11 Peptide Sequence
EVQLVESGGGLVKPGGSLKLSCAASGFTFSSYAMSWVRQTPEKRLEWVATISDGGIYTYYPDNVKGRFTISRDNAKNNLFLQMSHLKSEDTAMYYCVRDGGYWGQGTTLTVSS

SEQ ID NO: 308 - protein, 116 aa, Artificial Sequence
  VH-12 Peptide Sequence
QIQLVQSGPELKKPGETVKISCKASGYTFTNYGMNWVKQAPGKGLKWMGWINTNTGEPTYVEEFKGRFAFSLETSASTAYLQINNLKNEDTATYFCAPYDNFFAYWGQGTLVTVSA

SEQ ID NO: 309 - protein, 116 aa, Artificial Sequence
  VH-13 Peptide Sequence
QVQLQQSGPELVKPGASVKISCKASGYSFTNYYIHWVKQRPGQGLEWIGWIYPGSGNTNYNEKFKGKATLTADTSSSTTNMQLSSLTSEDSAVYYCSTAPGGFDVWGSGTTVTVSS

SEQ ID NO: 310 - protein, 116 aa, Artificial Sequence
  VH-14 Peptide Sequence
QVQLVQSGAEVKKPGASVKVSCKASGYSFTNYYMHWVRQAPGQGLEWMGWIYPGSGNTNYNEKFQGRVTMTADTSISTAYMELSRLRSDDTAVYYCSTAPGGFDVWGQGTTVTVSS

SEQ ID NO: 311 - protein, 116 aa, Artificial Sequence
  VH-15 Peptide Sequence
QVQLVQSGAEVKKPGASVKVSCKASGYSFTNYYIHWVRQAPGQRLEWMGWIYPGSGNTNYNEKFQGRVTLTADTSASTTYMELSSLRSEDTAVYYCSTAPGGFDVWGQGTTVTVSS

SEQ ID NO: 312 - protein, 119 aa, Artificial Sequence
  VH-16 Peptide Sequence
QIQLVQSGPDLKKPGETVKISCKASGYTFTTYVMSWVKQAPGKDLKWMGWINTHSGVPTYADDFKGRFDFSLETSANTAFLQINNLKNEDTATYFCTRDGNDGDAMDNWGQGTSVTVSS

SEQ ID NO: 313 - protein, 120 aa, Artificial Sequence
  VH-17 Peptide Sequence
QVQLKQSGPGLVQPSQSLSITCTVSGFSLTSYGVHWVRQPPGKGLEWLGVIWSGGSTDYNAAFISRLSISKDNSKSQVFFKMNSLQADDTAIYYCAKGPYDYDLGWFAYWGQGTLVTVSA

SEQ ID NO: 314 - protein, 116 aa, Artificial Sequence
  VH-18 Peptide Sequence
QIQLVQSGPELKKPGETVKISCKASGYTFTTYGMSWVKQAPGKGLKWMAWINTYSGVPTYADDFKGRFAFSLETSASTAYLQINNLTNEDTATYFCARGPYAMDYWGQGTSVTVSS

SEQ ID NO: 315 - protein, 115 aa, Artificial Sequence
  VH-19 Peptide Sequence
QVQLQQPGAELVGPGSSVKLSCKASGYTFTNYWIHWVKQRPLQGLEWIGNIDPSDSETHYNQKFKDKATLTVDKSSSTAYMQLSSLTSEDSAVYYCARHGYYDYWGQGTTLTVSS

SEQ ID NO: 316 - protein, 119 aa, Artificial Sequence
  VH-20 Peptide Sequence
QVQLQQPGAELVKPGASVKLSCKASGYTFTSYWMHWVKQRPGQGLEWIGMIHPNSGSTDYNEKFKNKATLNVDKSSSTAYIQLSSLTSEDSAVYYCTRWGIYYYARDYWGQGTTLTVSS

SEQ ID NO: 317 - protein, 117 aa, Artificial Sequence
  VH-21 Peptide Sequence
QIQLVQSGPELKKPGETVKISCKASGYTFTTYGMSWVKQAPGKGLKWMGWINTYSGVPTYADDFKGRFAFSLETSASTAYLQINNLKNEDTATYFCAVPYEYDGAYWGQGTLVTVSA

SEQ ID NO: 318 - protein, 115 aa, Artificial Sequence
  VH-22 Peptide Sequence
EVQLQQSGPELVKPGASVKISCKASGYTFTDYYMNWVKQSHGKSLEWIGDINPNNGGTNYNQKFKGKATLTVDKSSSTAYMELRSLTSEDSAVYYCTSGYGFPYWGQGTLVTVSA

SEQ ID NO: 319 - protein, 117 aa, Artificial Sequence
  VH-23 Peptide Sequence
QIQLVQSGPELKKPGETVKISCKASGYTFTTYGMGWVKQAPGKGLKWMGWINTYSGVPTYADDFKGRFAFSLETSTSTAYLQINNLKNEDMATYFCATPYEYDGAYWGQGTLVTVSA

SEQ ID NO: 320 - protein, 112 aa, Artificial Sequence
  VH-24 Peptide Sequence
QVQLQQSGPELVKPGDSVKISCKAAGYTFSDYYINWVKQRPGQGLEWIGWIYPVSVNTKYNEKFKGKATLTVDTSSSTAYMQLSSLTSEDSGVYFCAYLDYWGQGTLVTVSA

SEQ ID NO: 321 - protein, 120 aa, Artificial Sequence
  VH-25 Peptide Sequence
QVQLKQSGPGLVQPSQSLSITCTVSGFSLTSYGVHWVRQAPGKGLEWLGVIWSGGSTDYNAAFMSRLSISKDNSKSQVFFKMNSLQADDTAIYYCAKSPDGYDVAWFGYWGQGTLVTVSA

SEQ ID NO: 322 - protein, 122 aa, Artificial Sequence
  VH-26 Peptide Sequence
QIQLVQSGPELKKPGETVKISCKASGYTFTNYGMNWVKQAPGKGLKWMGWINTYTGEPSYADDFKGRFAFSLETSASTAYLQINNLKNEDMATYFCARWGGYAGDYYAMDFWGQGTSVTVSS

SEQ ID NO: 323 - protein, 122 aa, Artificial Sequence
  VH-27 Peptide Sequence
QIQLVQSGPELKKPGETVKISCKASGYTFTNYGMNWVKQAPGKGLKWMGWINTYTGEPSYADDFKGRFAFSLETSASTAYLQINNLKNEDMATYFCARWGGYDGDYYAMDYWGQGTSVTVSS

SEQ ID NO: 324 - protein, 122 aa, Artificial Sequence
  VH-28 Peptide Sequence
QIQLVQSGPELKKPGETVKISCKASGYTFTNFGMNWVKQAPGKGLKWMGWINTYTGEPSYADDFKGRFAFSLETSASTAYLQINNLKNEDIATYFCARWGGYAGDYYAMDYWGQGTSVTVSS

SEQ ID NO: 325 - protein, 116 aa, Artificial Sequence
  VH-29 Peptide Sequence
EVQLLESGGGLVKPGGSLKLSCAASGFTFSSYAMSWVRQTPEKRLEWVASISSGGDTYYPDSVKGRFTISRDNARNILYLQMSSLRSEDTAMYYCASYGNSLFDYWGQGTTLTVSS

SEQ ID NO: 326 - protein, 114 aa, Artificial Sequence
  VH-30 Peptide Sequence
QIQLVQSGPELKKPGETVKISCKASGYTFTNYGMNWVKQAPGKGLKWMGWINTYTGEPTYAGDLKGRFAFSLETSASTAYLQINNLKNEDTATYFCVRYTMDYWGQGTSVTVSS

SEQ ID NO: 327 - protein, 124 aa, Artificial Sequence
  VH-31 Peptide Sequence
QVTLKESGPGILQPSQTLSLTCSFSGFSLSTSGMGVGWIRQPSGKGLEWLAHIWWDDDKYYNTALKSGLTISKDASKNQVFLKIASMDTADTATYYCARNLYDGSYGYYAMDYWGQGTSVTVSS

SEQ ID NO: 328 - protein, 122 aa, Artificial Sequence
  VH-32 Peptide Sequence
QIQLVQSGPELKKPGETVKISCKASGYTFTNYGMNWVKQAPGKGLKWMGWINTYTGEPAYADDFKGRFAFSLETSASTAYLQINNLKNEDMATYFCARWGGYDGDYYAMDYWGQGTSVTVSS

SEQ ID NO: 329 - protein, 123 aa, Artificial Sequence
  VH-33 Peptide Sequence
EVQLVESGGDLVKPGGSLKLSCAASGFTFSNYGLSWIRQTPDKRLEWVATISSGGSYTYYPDSVKGRFTISRDSAKNTLYLQMSSLKSEDTAMYYCARHAHYYGVSPYYFDYWGQGTCLTVSS

SEQ ID NO: 330 - protein, 119 aa, Artificial Sequence
  VH-34 Peptide Sequence
QIQLVQSGPEVKKPGETVKISCKASGYIFTNYGMNWVKQAPGKGLKWMGWINTYTGEPTYTDDFKGRFAFSLETSASTAYLQINNLKNEDTATYFCAKFGNYVGAMDYWGQGTSVTVSS

SEQ ID NO: 331 - protein, 120 aa, Artificial Sequence
  VH-35 Peptide Sequence
EVQLQQSGPELVKPGASVKISCKASGNTFTDHNMHWVKQSHGKSLEWIGYIYPYNGGTGYNQKFKSKATLTVDNSSSTVYMELRSLTSEDSAVYYCARGEYDYLAWFAYWGQGTLVTVSA

SEQ ID NO: 332 - protein, 119 aa, Artificial Sequence
  VH-36 Peptide Sequence
QIQLVQSGPELKKPGETVKISCKASGYTFTNYGMNWVKQAPGKGLKWMGWINTYTGEPTYVDDFKGRFAFSLETSASTAYLRINNLKNEDTATYFCAKFGNYVGAMDYWGQGTSVTVSS

SEQ ID NO: 333 - protein, 117 aa, Artificial Sequence
  VH-37 Peptide Sequence
EVQLVETGGGLVKPGGSLKLSCAASGFTFSSYAMSWVRQTPEKRLEWVASISSGGSTYYPDSVKGRFTISRDNARNILYLQMSSLRSEDTAMYYCTRFTTVVEMDYWGQGTSVTVSS

SEQ ID NO: 334 - protein, 112 aa, Artificial Sequence
  VH-38 Peptide Sequence
QVQLQQTGAELVKPGASVKLSCKASGYTFTSYWINWVKQRPGQGLEWIGNIYPGSSSIYYSEKFKSKATLTVDTSSSTAYMQLSSLTSDDSAVYYCARWGYWGQGTTLTVSS

SEQ ID NO: 335 - protein, 121 aa, Artificial Sequence
  VH-39 Peptide Sequence
QVTLKESGPGILQPSQTLSLTCSFSGFSLSTFGMGVGWIRQPSGKGLEWLAHIWWDDDKHYNPALKSRLTISKDTSKNQVFLRIANVDTADNATYYCARIDYGDYVGFAYWGQGTLVTVSA

SEQ ID NO: 336 - protein, 118 aa, Artificial Sequence
  VH-40 Peptide Sequence
QVQLQQSGPELVRPGALVKISCKASGYTFTSYDINWVKQRPGQGLEWIGWIYPGDGSTKYNEKFKGKATLTADKSSSTAYMQLSSLTSENSAVYFCAREAASNAMDYWGQGTSVTVSS

SEQ ID NO: 337 - protein, 122 aa, Artificial Sequence
  VH-41 Peptide Sequence
EVKLEESGGGLVQPGGSMKLSCVASGFTFSNYWMNWVRQSPEKGLEWVAEIRLKSNNYATHYAESVKGRFTISRDDSKSSVYLQMNNLRAEDTGIYYCTRHYGFPYWYFDVWGAGTTVTVSS

SEQ ID NO: 338 - protein, 118 aa, Artificial Sequence
  VH-42 Peptide Sequence
QIQLVQSGPELKKPGETVKISCKASGYTFTNYGMNWVKQAPGKGLKWMGWINTNTGEPTYAEEFKGRFAFSLETSASTAYLQINNLKNEDTATYFCATGGGNWDFDYWGQGTTLTVSS

SEQ ID NO: 339 - protein, 114 aa, Artificial Sequence
  VH-43 Peptide Sequence
QIQLVQSGPELTKPGETVKISCKASGYTFTDYGMNWVRQAPGETLKWMGWINTYTGEPTYADDFKGRFAFSLESSASTAYLQINNLKNEDVATYFCARYPMDYWGQGTSVTVSS

SEQ ID NO: 340 - protein, 122 aa, Artificial Sequence
  VH-44 Peptide Sequence
EVKLEESGGGLVQPGGSMKLSCVASGFTFSNYWMNWVRQSPEKGLEWVAELRLKSNNYATHYAESVKGRFTISRDDSKSSVYLQMNNLRAEDTGIYYCTRHYGFPYWYFDVWGAGTTVTVSS

SEQ ID NO: 341 - protein, 118 aa, Artificial Sequence
  VH-45 Peptide Sequence
EVQLQQSGPELVKPGASVKMSCKASGYTFTSYVMHWVKQKPGQGLEWIGYINPYNDGTKYNEKFKGKATLTSDKSSSTAYMELSSLTSEDSAVYYCARLLFYYAMDYWGQGTSVTVSS

SEQ ID NO: 342 - protein, 118 aa, Artificial Sequence
  VH-46 Peptide Sequence
QVQLQQSGPELVRPGALVKISCKASGYTFTSYDINWVKQRPGQGLEWIGWIYPGDGSTKYNEKFKGKATLTADKSSSTVYMQLSSLTSENSAVYFCAREAASNAMDYWGQGTSVTVSS

SEQ ID NO: 343 - protein, 118 aa, Artificial Sequence
  VH-47 Peptide Sequence
QVQLQQSGPELVKPGALVKISCKASGYTFTSYDINWVKQRPGQGLEWIGWIYPGDGSTKYNEKFKGKAALTADKSSSTAYMQLSSLTSENSAVYFCAREAASNAMDYWGQGTSVTVSS

SEQ ID NO: 344 - protein, 118 aa, Artificial Sequence
  VH-48 Peptide Sequence
EVQLQQSGPELVKPGASVKMSCKASGYSFTNYIMHWVKQKPGQGLEWIGYINPYNDGTKYNEKFKGKATLTSDKSSSTAYMELSSLTSEDSAVYYCARLLFYYAMDYWGQGTSVTVSS

SEQ ID NO: 345 - protein, 118 aa, Artificial Sequence
  VH-49 Peptide Sequence
QVQLQQSGAELVKPGASVKLSCKASGYTFRSYDINWVRQRPEQGLEWIGWIFPGEGISKYNEKFKGKATLTTDKLSSTAYMQLSSLTSEDSAVYFCAREATAGAMDYWGQGTSVTVSS

SEQ ID NO: 346 - protein, 122 aa, Artificial Sequence
  VH-50 Peptide Sequence
EVKLLESGGGLVQPGGSMKLSCVASGFTFSNFWMNWVRQSPEKGLEWVAEIRLKSNNYATHYAESVKGRFTISRDDSKSSVYLQMNNLRAEDTGIYYCTRHYGFPYWYFDVWGAGTTVTVSS

SEQ ID NO: 347 - protein, 118 aa, Artificial Sequence
  VH-51 Peptide Sequence
QIQLQQSGAELVKPGASVKLSCKASGYTFTSYDICWVRQRPEQGLEWIGWIFPGDGTTKYTENFKGKATLTTDKSSSTAYMHLSRLTSEDSAVYFCAREGAGSWFAYWGQGTLVTVSA

SEQ ID NO: 348 - protein, 114 aa, Artificial Sequence
  VH-52 Peptide Sequence
EVQLQQSGAELVRPGTSVKVSCKASEYAFNNYMMEWVKQRPGQGLEWIGVINPGSGATNYNENFKDKATLTADKSSTTAYMQLSSLTSDDSAVYFCTYNDLGYWGQGTLVTVSA

SEQ ID NO: 349 - protein, 123 aa, Artificial Sequence
  VH-53 Peptide Sequence
EVKLQQSGPELMKPGTSMKISCKASGYSFTGYTMNWVKQSHGKNLEWIGLINPYNGGTNYNQKFRGKATLSVDKSSNTAYMELLSLTSEDSAVYYCARKDDYYGSSPYALDYWGQGTSVTVSS

SEQ ID NO: 350 - protein, 116 aa, Artificial Sequence
  VH-54 Peptide Sequence
QVQLQQSGAELMKPGASVKISCKATGYTFTNYWIEWVKQRPGHGLEWIGEFLPGDGSSHYNEKFKGKATFTSDTSSNTAYIHLTSLTSEDSAVYYCVRDDYDSDYWAQGTTLTVSS

SEQ ID NO: 351 - protein, 120 aa, Artificial Sequence
  VH-55 Peptide Sequence
QVQMKQSGPGLVQPSQSLSITCTVSGFSLINYGVHWVRQSPGKGLEWLGVIWSGGSTDYNAAFISRLSISKDNSKSQVFFKMNSLQADDTAIYYCARIYYYGRGYAMDYWGQGTSVTVSS

SEQ ID NO: 352 - protein, 122 aa, Artificial Sequence
  VH-56 Peptide Sequence
EVQLQQSGAEVVKPGAPVKLSCKASGYTFNNYWLNWVKQRPGRGLEWIGRIDPSDSETHYNQKFKDKATLTVDMSSSTAYIQLSSLTSEDSAVYYCARGDYYYGTRGPMDYWGQGTSVTVSS

SEQ ID NO: 353 - protein, 115 aa, Artificial Sequence
  VH-57 Peptide Sequence
QVQLQQSGAELVRPGASVNLSCKASGYTFTNYWMNWVKQRPGQGLEWVGMIDPSDSETHYNQMFKDKATLTIDKSSSIAYMQLSSLTSEDSAVYYCARWGAMDYWGQGTSVTVSS

SEQ ID NO: 354 - protein, 121 aa, Artificial Sequence
  VH-58 Peptide Sequence
QVQLKQSGPGLVAPSQSLSITCTVSGFSLTSYGVHWVRQPPGKGLEWLGIIWAGGSTNYNPALMSRLSISKDKSKSQVFLKMNSLKTDDTAMYYCARDRASLLRPGAMDYWGQGTSVTVSS

SEQ ID NO: 355 - protein, 118 aa, Artificial Sequence
  VH-59 Peptide Sequence
QIQLVQSGPELKKPGETVKISCKASGYTFTNYGMNWVKQAPGKGLKWMGWINTNTGEPTYAEEFKGRFAFSLETSASTAYLQINYLKNEDTATFFCARLDYDYDEDYWGQGTTLTVSS

SEQ ID NO: 356 - protein, 120 aa, Artificial Sequence
  VH-60 Peptide Sequence
QVQLVETGPGLVAPSQSLSITCTVSGFSLTSYGVHWIRQSPGKGLEWLGTIWAGGSTDYNSPLMSRLSISKDNSKNQVFLKMNSLQIDDTAIYYCASPPSGYDYDVFASWGQGTLVTVSA

SEQ ID NO: 357 - protein, 120 aa, Artificial Sequence
  VH-61 Peptide Sequence
QVQLKQSGPGLVQPSQSLSITCTVSGFSLINYGVHWVRQSPGKGLEWLGVIWSGGSTDYNAAFISRLSISKDNSKSQVFFKMNSLQADDTAIYYCARIYYYGRGYAMDYWGQGTSVTVSS

SEQ ID NO: 358 - protein, 120 aa, Artificial Sequence
  VH-62 Peptide Sequence
QVQLKESGPGLVAPSQSLSITCTVSGFSLTSYGVHWIRQPPGKGLEWLGGIWAGGSTDYNSPLMSRLSITKDNSKSQVFLKMNSLQSDDTAMYYCASPPSGYDYDVFAYWGQGTLVTVSA

SEQ ID NO: 359 - protein, 120 aa, Artificial Sequence
  VH-63 Peptide Sequence
QVQLKESGPVLVAPSQSLSITCTVSGFSLSSYGVHWVRQPPGKGLEWLGVIWAGGSTDYDSALMSRLSISKDNSKSQVFLKMDSLQTDDTAMYYCAKPPYDYDGAWFAYWGQGTLVTVSA

SEQ ID NO: 360 - protein, 114 aa, Artificial Sequence
  VH-64 Peptide Sequence
QVQLQQSGPQLVRPGASVKISCKASGYSFTNYWMHWVKQRPGQGLEWIGMIDPSDSETRLNQKFKDKATLTVDKSSSTAYMQLSSPTSEDSAVYYCATGRPDYWGQGTTLTVSS

SEQ ID NO: 361 - protein, 114 aa, Artificial Sequence
  VH-65 Peptide Sequence
QVQLQQSGPQLVRPGASVKISCKASGYSFTSYWMHWVKQRPGQGLEWIGMIDPSDSETRLNQKFKDKATLTVDKSSSTAYMQLSSPTSEDSIVYYCAKGRPDYWGQGTTLTVSS

SEQ ID NO: 362 - protein, 118 aa, Artificial Sequence
  VH-66 Peptide Sequence
DGKLQESGPGLVKPSQSLSLTCSVTGYSITSGYYWNWIRQFPGNKLEWMGHISYDGRNNYNPSLKNRISITRDTSKNQFFLKLNSVTTEDTATYYCAGYDFLWYFDVWGTGTTVTVSS

SEQ ID NO: 363 - protein, 121 aa, Artificial Sequence
  VH-67 Peptide Sequence
QVQLKESGPGILQPSQTLSLTCSFSGFSLSTFGMGVGWIRQPSGKGLEWLAHIWWDDDKHYNPALKSRLTISKDTSKNQVFLRIANVDTADNATYYCARIDYGDYVGFAYWGQGTLVTVSA

SEQ ID NO: 364 - protein, 118 aa, Artificial Sequence
  VH-68 Peptide Sequence
DGQLQESGPGLVKPSQSLSLTCSVTGYSITSGYYWNWIRQFPGNKLEWMGHISYDGRNNYNPSLKNRISITRDTSKNQFFLKLNSVTTEDTATYYCAGYDFLWYFDVWGTGTTVTVSS

SEQ ID NO: 365 - protein, 119 aa, Artificial Sequence
  VH-69 Peptide Sequence
EVQLQQSGAELVKSGASVKLSCTASGFNIKDYYMHWVKQRTEQGLEWIGRIYPEDDETKYAPKFQGKATITADTSSNTAYLQLSSLTSEDTAVYYCARSGGYYVWFAYWGQGTLVTVSA

SEQ ID NO: 366 - protein, 121 aa, Artificial Sequence
  VH-70 Peptide Sequence
EVQLQQSGPELVKPGSSVKISCKASRYTFTDYNMDWVKQSHGKRLEWIGYIYPNNGGTGYNQKFKGKATLTVDKSSSTAYMELRSLTSEDSAVYYCARSYYDGSYDAMDYWGQGTSVTVSS

SEQ ID NO: 367 - protein, 114 aa, Artificial Sequence
  VH-71 Peptide Sequence
QIQLVQSGPELKKPGETVKISCKASGYTFTIFGMNWVKQAPGKGLKWMGWVNTYTGEPTYADDFKGRFAFSLETSASTAYLQINNLKNEDTATYFCARGWFAYWGQGTLVTVSA

SEQ ID NO: 368 - protein, 120 aa, Artificial Sequence
  VH-72 Peptide Sequence
QVQLKESGPVLVAPSQSLSITCTVSGFSLTSYGIHWVRQPPGKGLEWLGVIWAGGSTNYNSALMSRLSISKDNSKSQVFLKMNSLQIDDTAMYYCAKPPHDYDQAWFAYWGQGTLITVSA

SEQ ID NO: 369 - protein, 116 aa, Artificial Sequence
  VH-73 Peptide Sequence
QVQLQQSGAELVRPGASVKLSCKASGYTFTSSWMNWVKQRPGQGLDWIGMIDPSDSETHYNQMFKDKATLTVDKSSNTAYMQLSRLTSEDSAVYYCVNSNYESGYWGQGTTLTVSS

SEQ ID NO: 370 - protein, 116 aa, Artificial Sequence
  VH-74 Peptide Sequence
QVQLQQSGAELVRPGASVKLSCKASGYTFTGYWLNWVKQRPGQGLEWIGMIDPSDSETHYNQVFKDKATMTVDRSSSTAYMQLSGLTSEDSAVYYCANSNYASGSWGQGTTLTVSS

SEQ ID NO: 371 - protein, 120 aa, Artificial Sequence
  VH-75 Peptide Sequence
EVQLQQSGPELVKPGASVKVSCKASGYSFTDYNMYWVMQSHGKSLEWIGYIDPYNDATSYSQKFTGKATLTVDKSSSTAFMHLNSLTSEDSAVYYCARWGRYEYYAMDYWGQGTSVTVSS

SEQ ID NO: 372 - protein, 115 aa, Artificial Sequence
  VH-76 Peptide Sequence
QVQLKESGPDLVQPSQTLSLTCTVSGFSLTIYGVHWVRQPPGKGLEWVGTVAWDDKKYYNSPLQSRLSISRDTSKNQVFLKLSSLQTEDTAMYYCTMTGGPINYWGPGTSVTVSS

SEQ ID NO: 373 - protein, 117 aa, Artificial Sequence
  VH-77 Peptide Sequence
EVQLVESGGGLVKPGGSLKLSCAASGFTFSSYAMSWVRQTPEKRLEWVASISSGDSPYYPDSVKGRFTISRDNARNILYLQMSSLRSEDTAMYYCTRFTTVVEMDYWGQGTSVTVSS

SEQ ID NO: 374 - protein, 112 aa, Artificial Sequence
  VL-1 Peptide Sequence
DIVLTQSPLSLPVTPGEPASISCRSSKSLLYKDGKTYLNWFLQKPGQSPQLLIYLMSTHASGVPDRFSGSGSGTDFTLKISRVEAEDVGVYYCQQLVDYPLTFGGGTKLEIK

SEQ ID NO: 375 - protein, 112 aa, Artificial Sequence
  VL-2 Peptide Sequence
DIVMTQTPLSLSVTPGQPASISCKSSKSLLHSDGITYLYWYLQKPGQSPQLLIYRMSNLASGVPDRFSGSGSGTDFTLKISRVEAEDVGVYYCAQMLEFPLTFGQGTKLEIK

SEQ ID NO: 376 - protein, 107 aa, Artificial Sequence
  VL-3 Peptide Sequence
DILMTQSPSSMSVSLGDTVSITCHASQGINSNMGWLQQKPGKSFKGLIYHATNLEDGVPSRFSGSGSGADYSLTISSLESEDFADYYCVQYAQFPPTFGSGTKLEIK

SEQ ID NO: 377 - protein, 112 aa, Artificial Sequence
  VL-4 Peptide Sequence
DVVMTQTPLTLSVAIGQPASISCKSSQSLLYTNGKTYLNWLLQRPGQSPKRLIYLLSKLDSGVPDRFSASGSGTDFTLKISRVEAEDLGVYYCLQSTHFPLTFGAGTKLEMK

SEQ ID NO: 378 - protein, 112 aa, Artificial Sequence
  VL-5 Peptide Sequence
DVVMTQTPLTLSVTIGQPASISCKSSQSLFDSDGKTYLNWLLQRPGQSPKRLIYLVSKLDSGVPDRFTGSGSGTDFTLKISRVEAEDLGVYYCWQGTHFPLTFGAGTKLEMK

SEQ ID NO: 379 - protein, 112 aa, Artificial Sequence
  VL-6 Peptide Sequence
DVLMTQTPLSLPVSLGDQASISCRSSQSIVHNNGNTYLEWYLQKPGQSPKLLIYKVSNRFSGVPDRFSGSGSGTDFTLKISRVEAEDLGVYYCFQGSHVPLTFGGGTKLELK

SEQ ID NO: 380 - protein, 107 aa, Artificial Sequence
  VL-7 Peptide Sequence
DIQMTQTTSSLSASLGDRVTISCSASQGINNYLNWYQQKPDGTVKLLIYYASSLHSGVPSRFSGSGSGTDYSLTISNLEPEDIATYYCQQYSQVPYTFGSGTKLEIK

SEQ ID NO: 381 - protein, 107 aa, Artificial Sequence
  VL-8 Peptide Sequence
DIQMNQSPSSLSASLGDTITITCRASQNIYIWLSWYQQKPGNIPKLLIYKASNLHTGVPSRFSGSGSGTDFTLTISTLQPEDIATYFCLQGQSYPLTFGAGTKLEMK

SEQ ID NO: 382 - protein, 107 aa, Artificial Sequence
  VL-9 Peptide Sequence
DIQMTQTTSSLSASLGDRVTINCSASQDISNYLNWYQQKPDGTVKLLIYYTSSLLSGVPSRFSGSGSGTDYSLTISNLEPEDIATYFCQQYSKLPYTFGSGTHLEIK

SEQ ID NO: 383 - protein, 112 aa, Artificial Sequence
  VL-10 Peptide Sequence
DIVMTQAAFSNPVTLGTSASISCRSSKSLLHSDGITYLYWYLQRPGQSPQLLIYRMSNLASGVPDRFSGSGSGTDFTLRISRVEAEDVGVYYCAQMIEFPLTFGAGTILELK

SEQ ID NO: 384 - protein, 112 aa, Artificial Sequence
  VL-11 Peptide Sequence
DVVMTQTPLTLSVAIGQPASISCKSSQSLLYTNGKTYLNWLLQRPGQSPKRLIYLVSKLDSGVPDRFSGSGSGTDFTLKISRVEAEDLGVYYCLQSTHFPLTFGAGTKLELK

SEQ ID NO: 385 - protein, 112 aa, Artificial Sequence
  VL-12 Peptide Sequence
DVLMTQTPLSLPVSLGDQASISCRSSQSIVHSNGNTYLEWYLQKPGQSPKLLIYKVSNRFSGVPDRFSGSGSGTDFTLKISRVEAEDLGVYYCFQGSHVPLTFGAGTKLELK

SEQ ID NO: 386 - protein, 112 aa, Artificial Sequence
  VL-13 Peptide Sequence
DIVITQDELSNPVTSGESVSISCRSSKSLLYKDGKTYLNWFLQRPGQSPQLLIYLMSTHASGVSDRFSGSGSGTDFTLEISRVKAEDVGVYYCQQLVDYPLTFGAGTKLELK

SEQ ID NO: 387 - protein, 112 aa, Artificial Sequence
  VL-14 Peptide Sequence
DIVMTQAAFSNPVTLGTSASISCRSSKSLLHSDGITYLYWYLQRPGQSPQLLIYRMSNLASGVPDRFSGSGSGTDFTLRISRVEAEDVGVYYCAQMLEFPLTFGAGTKLELK

SEQ ID NO: 388 - protein, 112 aa, Artificial Sequence
  VL-15 Peptide Sequence
DIVMTQSPLSLPVTPGEPASISCRSSKSLLHSDGITYLYWYLQKPGQSPQLLIYRMSNLASGVPDRFSGSGSGTDFTLKISRVEAEDVGVYYCAQMLEFPLTFGQGTKLEIK

SEQ ID NO: 389 - protein, 113 aa, Artificial Sequence
  VL-16 Peptide Sequence
DVVMTQTPLTLSVTIGQPASISCKSSQSLLYTDGKTYLSWFLQRPGQSPKRLIYLVSKLDSGVPDRFSGSGSGTDFTLKISRVEAEDLGVYYCLQSTHFPLTFGAGTKLEVKR

SEQ ID NO: 390 - protein, 108 aa, Artificial Sequence
  VL-17 Peptide Sequence
SIVMTQTPKFLLVSAGDRVTITCKASQSVSNDVAWYQQKPGQSPKLLIYYASNRYTGVPDRFTGSGYGTDFTFTISTVQAEDLAVYFCQQDYTSPYTFGGGTKLEIKR

SEQ ID NO: 391 - protein, 108 aa, Artificial Sequence
  VL-18 Peptide Sequence
DIQMTQTTSSLSASLGDRVTISCSASQGISNYLNWYQQKPDGTVKLLIYYTSSLHSGVPSRFSGSGSGTDYSLTISNLEPEDIATYYCQQYSELPYTFGSGTKLEIKR

SEQ ID NO: 392 - protein, 108 aa, Artificial Sequence
  VL-19 Peptide Sequence
DIVMTQSHKFMSTSVGDRVSITCKASQDVSTAVAWYQQKPGQSPKLLIYWASTRHTGVPDRFTGSGSGTDYTLTISSVQAEDLALYYCQQHYTTPLTFGAGTKLELKR

SEQ ID NO: 393 - protein, 108 aa, Artificial Sequence
  VL-20 Peptide Sequence
DIVMTQSQKFMSTSVGERVSITCKASQNVGTNVAWYQQKAGQSLELLIYGASNRHTGVPDRFTGSGSGTDFTLTITNVQSEDMTNYFCEQYSNFPLTFGAGTKLELKR

SEQ ID NO: 394 - protein, 113 aa, Artificial Sequence
  VL-21 Peptide Sequence
DVVMTQTPLTLSVTIGQPASISCKSSQSLFHSDGKTYLNWLLQRPGQSPKRLIYLVSKLDSGVPDRFTGSGSGTDFTPKISRVEDEDLGVYYCWQGTHFPLTFGAGTKLEMKR

SEQ ID NO: 395 - protein, 108 aa, Artificial Sequence
  VL-22 Peptide Sequence
DIQMNQSPSSLSASLGDTISITCRASQNINIWLSWYQQKPGNIPQLLIYKASNLHTGVPSRFSGSGSGTDFTLTISSLQPEDIATYYCLQGQSYPLTFGAGTKLVMKR

SEQ ID NO: 396 - protein, 111 aa, Artificial Sequence
  VL-23 Peptide Sequence
DVVMTQTPLTLSVTIGQPASISCKSSQSLLHSDGKTYLNWLLQRPGQPPKRLMYLVSTLDSGVPDRFTGSGSGTDFTLKISRVEAEDLGVYYCWQGTHFPLTFGAGTKPER

SEQ ID NO: 397 - protein, 111 aa, Artificial Sequence
  VL-24 Peptide Sequence
DIVMTQAAFSNPVTLGTSASISCRSSKSLLHSDGITYFYWYLQRPGQSPQLLIYRMSNLASGVPDRFSGSGSGTDFTLRISRVEAEDVGVYYCAQMLEFPLTFGAGTKLER

SEQ ID NO: 398 - protein, 108 aa, Artificial Sequence
  VL-25 Peptide Sequence
DIVMTQSHKFMSTSVGDRVSITCKASQDVRTAVAWYQQKPGQSPKLLIYWASTRHTGVPDRFTGSGSGTDFTLTLSNVQSEDLADYFCQQYSSYPWTFGGGTKLEIKR

SEQ ID NO: 399 - protein, 112 aa, Artificial Sequence
  VL-26 Peptide Sequence
NIWLTQSPSSLAVSAGEMVTMTCKSSQSVLYSSNQKNYLAWYQQKPGQSPKLLIYWASTRESGVPDRFTGSGSGTDFSLTISSVQAEDLAVYYCHQYLSSLTFGAGTKLELK

SEQ ID NO: 400 - protein, 112 aa, Artificial Sequence
  VL-27 Peptide Sequence
NIMMTQSPSSLAVSAGEKVTMSCKSSQSVLYSSNQKNYLAWYQQKPGQSPKLLIYWASTRESGVPDRFTGSGSGTDFTLTISSVQPEDLAVYYCHQYLSSLTFGAGTKLELK

SEQ ID NO: 401 - protein, 112 aa, Artificial Sequence
  VL-28 Peptide Sequence
NIMMTQSPSSLAVSAGQKVTMSCKSSQSVLYSSSQKNYLAWYQQKPGQSPKLLIYWASTRESGVPDRFSGSGSGTDFTLTISSVQPEDLAVYYCHQYLSSLTFGAGTKLELK

SEQ ID NO: 402 - protein, 112 aa, Artificial Sequence
  VL-29 Peptide Sequence
DVVMTQTPLSLPVSLGDQASISCRSSQSLVHNSGNTYLHWYLQRPGQSPNLLIYKVSNRFSGVPDRFSGSGSGTDFTLKISRVAAEDLGVYFCSQSTHVPPTFGGGTKLEIK

SEQ ID NO: 403 - protein, 109 aa, Artificial Sequence
  VL-30 Peptide Sequence
QAVVTQESALTTSPGETVTLTCRSSTGAVTTSNYANWVQEKPDHLFTGLIGGINNRVPGVPARFSGSLIGDKAALTITGAQTEDEAIYFCALWYSNHWVFGGGTKLTVL

SEQ ID NO: 404 - protein, 112 aa, Artificial Sequence
  VL-31 Peptide Sequence
DIVMTQAAFSNPVTLGTSASISCRSSKSLLHTNGITFLYWYLQKPGQSPQPLIYQMSNLASGVPDRFSSSGSGTDFTLRISRVEAEDVGVYYCAQNLELPWTFGGGTKLEIN

SEQ ID NO: 405 - protein, 112 aa, Artificial Sequence
  VL-32 Peptide Sequence
NIMMTQSPSSLAVSAGEKVTMSCKSSQSVLYSSNQKNYLAWYQQKPGQSPKLLIYWASTRESGVPDRFTGSGSGTDFTLTISSVQAEDLAVYYCHQYLSSLTFGAGTKLELK

SEQ ID NO: 406 - protein, 113 aa, Artificial Sequence
  VL-33 Peptide Sequence
DIVMTQSPSSLAMSVGQKVTMSCKSSQSLLNSSNQKNYLAWYQQKPGQSPKLLVYFASTRESGVPDRFIGSGSGTDFTLTISSVQAEDLADYFCQQHYSTPYTFGGGAKLEIK

SEQ ID NO: 407 - protein, 107 aa, Artificial Sequence
  VL-34 Peptide Sequence
DIRMTQSPSSLSASLGDTITITCHASQNINVWLSWYQQKPGNIPKLLIYKASNLHTGVPSRFSGSGSGTGFTLTISSLQPEDIATYYCQQGQSYPYTFGGGTKLELK

SEQ ID NO: 408 - protein, 107 aa, Artificial Sequence
  VL-35 Peptide Sequence
EIVLTQSPASLSVTTGEKVTIRCITSIDIDDDMNWYQQKPGEPPKLLISEGNTLRPGVPSRFSSSGYGTDFVFTIENTLSEDVADYYCLQSDNKPLTFGAGTKLELK

SEQ ID NO: 409 - protein, 107 aa, Artificial Sequence
  VL-36 Peptide Sequence
DIQVIQSPSSLSASLGDTITITCHASQNINVWLSWYQQKPGNIPKLLIYKASNLHTGVPSRFSGSGSGTGFTLTISSLQPEDIATYYCQQGQSYPYTFGGGTKLELK

SEQ ID NO: 410 - protein, 107 aa, Artificial Sequence
  VL-37 Peptide Sequence
EIKMNQSPSSLSASLGDTITITCHASQNINVWLSWYQQKPGNIPKLLIYKASNLHTGVPSRFSGSGSGTGFTLTISSLQPEDIATYYCQQGQSYPYTFGGGTKLELK

SEQ ID NO: 411 - protein, 109 aa, Artificial Sequence
  VL-38 Peptide Sequence
QAVVTQESALTTSPGETVTLTCRSSTGAVTTSNYANWVQEKPDHLFTGLIGGTNNRAPGVPARFSGSLIGDKAALTITGAQTEDEAIYFCALWYSNHLVFGGGTKLTVL

SEQ ID NO: 412 - protein, 112 aa, Artificial Sequence
  VL-39 Peptide Sequence
DVLMTQTPLSLPVSLGDQASISCRSSQDIVHSSGNTYLEWYLQKPGQSLKLLIYKVSNRFSGVPDRFSASGSGTDFTLKISRVEAEDLGVYYCFQGSHVPPTFGSGTKLEIK

SEQ ID NO: 413 - protein, 112 aa, Artificial Sequence
  VL-40 Peptide Sequence
DIGMRQAAFSNPVTLGTSASISCRSSKSLLYSNGITYLYWFLQKPGQSPQLLIYQMSNLASGVPDRFSSSGSGTDFTLRISRVEADDVGVYYCAQNLELPWTFGGGTKLEIK

SEQ ID NO: 414 - protein, 111 aa, Artificial Sequence
  VL-41 Peptide Sequence
DIVLTQSPASLGVSLGQRATISCRASKSVSTSGYSYMHWYQQKPGQPPKLLIYLASILESGVPARFSGSGSGTDFTLNIHPVEEEDAAIYYCQHSRELPLTFGAGTKLELK

SEQ ID NO: 415 - protein, 111 aa, Artificial Sequence
  VL-42 Peptide Sequence
NIVLTQSPASLAVSLGQRATISCRASESVDSYGNSFMHWYQQKPGQPPKLLIYLASNLESGVPARFSGSGSRTDFTLTIDPVEADDAATYYCQQNNEDPWTFGGGTKLEIK

SEQ ID NO: 416 - protein, 112 aa, Artificial Sequence
  VL-43 Peptide Sequence
DVVMTQTPLTLSVTIGQPASISCKSSQSLLYSNGKTYLNWLLQRPGQSPKRLIYLVSKLDSGVPDRFTGSGSGTDFTLKISRVEAEDLGVYYCVQGTHFPQTFGGGTKLEIK

SEQ ID NO: 417 - protein, 107 aa, Artificial Sequence
  VL-44 Peptide Sequence
DILMTQSPSSMSVSLGDTVSITCHASQGINSNIGWLQQKPGKSFKGLIYHGTNLEDGVPSRFSGSGSGADYSLTISSLESEDFADYYCVQYDQFPWTFGGGTKLEIK

SEQ ID NO: 418 - protein, 111 aa, Artificial Sequence
  VL-45 Peptide Sequence
DIVMSQSPASLGVSLGQRATISCRASKSVSTSGYSYMHWYQQKPGQPPKLLIYLASILESGVPARFSGSGSGTDFTLNIHPVEEEDAAIYYCQHSRELPLTFGAGTKLELK

SEQ ID NO: 419 - protein, 111 aa, Artificial Sequence
  VL-46 Peptide Sequence
DIVLTQSPASLAVSLGQRATISCRASKSVSTSGYSYMHWYQQKPGQPPKLLIYLASILESGVPARFSGSGSGTDFTLNIHPVEEEDAATYYCQHSRELPLTFGAGTKLELK

SEQ ID NO: 420 - protein, 107 aa, Artificial Sequence
  VL-47 Peptide Sequence
DILMTQTPSSMSVSLGDTVSITCHASQGISSNIGWLQQKPRKSFKGLIYYGTNLEDGVPSRFSGSGSGADYSLTISSLESEDFADYYCVQYDQFPWTFGGGTKLEIK

SEQ ID NO: 421 - protein, 111 aa, Artificial Sequence
  VL-48 Peptide Sequence
DIVLTQSPASLAVSLGQRATISCRASKSVSTSGYSCMHWYQQKPGQPPKLLIYLASNLESGVPARFSGGGSGTDFTLSIHPVEEEDAATYYCHHSTELPYTFGGGTKLEVE

SEQ ID NO: 422 - protein, 111 aa, Artificial Sequence
  VL-49 Peptide Sequence
DIVLTQSPASLAVSLGQRATISCRASESVDSYGNSFMHWYQQKPGQPPKLLIYLASNLESGVPARFSGSGSRTDFTLTIDPVEADDAATYYCQQNNEDPWTFGGGTKLEIK

SEQ ID NO: 423 - protein, 111 aa, Artificial Sequence
  VL-50 Peptide Sequence
DVVMTQTPLTLSVTIGQPASISCKSSQSLLYSDGKTYLNWLLQRPGQSPKRLIYLVSQLDSGVPDRFTGSGSGTDFTLKISRVEADDLGVYCCVQGTHLPTFGGGTKLEIK

SEQ ID NO: 424 - protein, 111 aa, Artificial Sequence
  VL-51 Peptide Sequence
DIVMTQSPASLAVSLGQRATISCRASESVENHVNSFMHWFQQKPGQPPKLLIYRASNLQSGIPARFSGSGSRTDFTLTINPVEADDVATYYCQQNNEVPYTFGGGTKLEIK

SEQ ID NO: 425 - protein, 106 aa, Artificial Sequence
  VL-52 Peptide Sequence
QIVLSQSPAILSASPGEKVTMTCRASSSVTYMYWYQQKPGSSPQPWIYATSNLASGVPARFSGSGSGTSYSLTISRVEAEDAATYYCQQWSSNPLTFGAGTKLELK

SEQ ID NO: 426 - protein, 111 aa, Artificial Sequence
  VL-53 Peptide Sequence
DIVLTQSPASLAVSLGQRATISCRASESLDNSGISFMNWFQQRPGQPPKLLIYAASNLESGVPARFSGSGSGTDFSLNIHPMEEDDAAMYFCQHSKEVPWTFGGGTKLEIK

SEQ ID NO: 427 - protein, 107 aa, Artificial Sequence
  VL-54 Peptide Sequence
DIVMTQSHKIMSTSVGDRVSITCKASQDVSTTVAWFQQKPGQSPKLLLYWASTRHTGVPDRFTGSGSGTDYTLTISSVQAEDLALYYCQQHYSPPFTFGSGTKLEIK

SEQ ID NO: 428 - protein, 107 aa, Artificial Sequence
  VL-55 Peptide Sequence
DIVMTQSQKFMSTSVGDRVSVTCKASQNVGINVAWYQQKPGQSPKALIYSASYRYSGVPDRFTGSGSGTDFTLTISNVQSEDLAEYFCQQYNSYPYTFGGGTKLEMK

SEQ ID NO: 429 - protein, 112 aa, Artificial Sequence
  VL-56 Peptide Sequence
DVVMTQTPLTLSVTLGQPASISCRSSQSLLDSDGKTYLNWLLQRPGQSPKRLIYLVSRLDSGVPDRFTGSGSGTDFTLKISRVEAEDLGVYYCWQGTHFPFTFGGGTKLEIK

SEQ ID NO: 430 - protein, 107 aa, Artificial Sequence
  VL-57 Peptide Sequence
DIRMTQSPASLSASVGETVTITCRASGNIHNYLAWYHQKQGKSPQLLVYNVKTLADGVPSRFSGSGSGTQFSLKINSLQPEDFGTYYCQHFWSIFPTFGGGTKLEIK

SEQ ID NO: 431 - protein, 106 aa, Artificial Sequence
  VL-58 Peptide Sequence
QILLSQSPAILSASPGEKVTMTCRASSSVTYMYWYQQKPGSSPQPWIYATSNLASGVPARFSGSGSGTSYSLTISRVEAEDAATYYCQQWSSNPLTFGAGTKLELK

SEQ ID NO: 432 - protein, 107 aa, Artificial Sequence
  VL-59 Peptide Sequence
DILMTQSPASLSASVGETVTITCRASGNIHNYLAWYQQKQGKSPQLLVYSAKTLADGVPSRFSGSGSGTQFSLKIDSLQPEDFGTYYCQHFWSLFPTFGGGTKLEIK

SEQ ID NO: 433 - protein, 107 aa, Artificial Sequence
  VL-60 Peptide Sequence
DVVMTQTPKFLLVSAGDRVTITCKASQSVSSDVAWYQQKPGQSPKLLIYFASNRYTGVPDRFTGSGYGTDFTFTISTVQAEDLAVYFCQHNYISPFTFGGGTKLEIK

SEQ ID NO: 434 - protein, 107 aa, Artificial Sequence
  VL-61 Peptide Sequence
DIVMTQSHKFMSTSVGDRVSITCKASQDVSTAVAWYQQKPGQSPKLLIYWASTRHTGVPDRFTGSGSGTDYTLTISSVQAEDLALYYCQQHYSTPYTFGGGTKLEIK

SEQ ID NO: 435 - protein, 107 aa, Artificial Sequence
  VL-62 Peptide Sequence
DIAMTQSHKFMSTSVGDRVSITCKASQDVSTAVAWYQQKPGQSPKLLIYWASTRHTGVPDRFTGSGSGTDYTLTISSVQAEDLALYYCQQHYNTPYTFGGGTKLEIK

SEQ ID NO: 436 - protein, 112 aa, Artificial Sequence
  VL-63 Peptide Sequence
DVGMTQTPLILSVTIGQPASISCKSSQSLLYINGKTYLNWLLQRPGQSPKRLIYLVSKLDSGVPNRFSGSGSGTDFTLKISRVEAEDLGVYYCLQSTHFPQTFGGGTKLEIK

SEQ ID NO: 437 - protein, 107 aa, Artificial Sequence
  VL-64 Peptide Sequence
DILLTQSPSSMSVSLGDTVSITCHASQGINSNIGWLQQKPGKSFKGLIYHGTNLEDGVPSRFSGSGSGADYSLTISSLESEDFADYYCVQYDQFPWTFGGGTKLEIK

SEQ ID NO: 438 - protein, 112 aa, Artificial Sequence
  VL-65 Peptide Sequence
DIVMTQAAPSVPVTPGESVSISCRSSRSLLHSNGYTYLYWFLQRPGQSPRLLIYRMSNLASGVPDRFSGSGSGTAFTLRISRVEAEDVGVYYCMQHLEYPYTFGGGTKLEIK

SEQ ID NO: 439 - protein, 107 aa, Artificial Sequence
  VL-66 Peptide Sequence
DIQMTQTTSSLSASLGDRVTISCSASQGISNYLNWYQQKPDGTVKLLIYYTSSLHSGVPSRFSGSGSGTDYSLTISNLEPEDIATYYCQQYSKLPRTFGGGTKLEIN

SEQ ID NO: 440 - protein, 112 aa, Artificial Sequence
  VL-67 Peptide Sequence
DVVMTQTPLTLSVTIGQPASISCKSSRSLLDSDGKTYLNWLLQRPGQSPKRLIYLVSKLDSGVPDRFTGSGSGTDFTLKISRVEAEDLGVYYCWQGTHFPQTFGGGTKLEIN

SEQ ID NO: 441 - protein, 107 aa, Artificial Sequence
  VL-68 Peptide Sequence
DIQMNQSPSSLSASLGDTITITCHASQNINVWLSWYQQKPGNIPKLLIYQASNLHTGVPSRFSGRGSGTGFTLTISSLQPEDIATYYCQQGQSSPFTFGSGTKLEIK

SEQ ID NO: 442 - protein, 107 aa, Artificial Sequence
  VL-69 Peptide Sequence
DILMTQSHKFMSTSVGDRVSITCKASQDVSSVVVWYQQKPGQSPKQLIYWASTRHTGVPDRFTGSGSGTDYTLTISSVQAEDLALYYCQQHYSTPYTFGGGTKLEIK

SEQ ID NO: 443 - protein, 109 aa, Artificial Sequence
  VL-70 Peptide Sequence
QAVVTQESALTTSPGETVTLTCRSSTGAVTTSNYANWDQEKPDHLFTGLIGGTNNRAPGVPARFSGSLIGDKAALTITGAQTEDEAIYFCALWYSNHLVFGGGTKVTVL

SEQ ID NO: 444 - protein, 111 aa, Artificial Sequence
  VL-71 Peptide Sequence
DIVMTQSPASLPVSLGQRATISCRASKSVTTSAYSYIHWYQQRPGQPPKLLIYLASNLESGVPARFSGSGSGTDFTLNIHPVEEEDAATYYCQHNRELPPTFGGGTKLEIN

SEQ ID NO: 445 - protein, 107 aa, Artificial Sequence
  VL-72 Peptide Sequence
DIVLTQSPATLSVTPGDSVSFSCRASQIINNNLHWYQQKSHESPRLLIRYTSQSISGIPSRFSGSGSGTDFTLSINNVETEDFGMYFCQQTNSWPLTFGAGTKLELK

SEQ ID NO: 446 - protein, 111 aa, Artificial Sequence
  VL-73 Peptide Sequence
DVVMTQTPLTLSVTIEQTASISCKSSQSLLDRDGKTYLNWLLQRPGQSPKRLIYLVSKLDSGVPDRFTGSGSGTDFTLKISRVEAEDLGVYYCWQGTHFPTFGGGTKLEIK

SEQ ID NO: 447 - protein, 107 aa, Artificial Sequence
  VL-74 Peptide Sequence
DVVMTQTPKFLPITAEDRVTITCKASQSVSNEVAWYQQKPGQSPKLLIYYASNRYTGVPDRFTGSGSGTDFTFTIRSVQLEDLAVYFCQQHYSSPWTFGGGTKLEIK

SEQ ID NO: 448 - protein, 442 aa, Artificial Sequence
  TB001 heavy chain peptide sequence
QVQLVQSGSELKKPGASVKVSCKASGYTFTNYGMNWVRQAPGQGLKWMGWINTNTGEPTYVEEFTGRFVFSLETSVSTAYLQISSLKAEDTAVYFCAPYDNFFAYWGQGTTVTVSSASTKGPSVFPLAPCSRSTSESTAALGCLVKDYFPEPVTVSWNSGALTSGVHTFPAVLQSSGLYSLSSVVTVPSSSLGTKTYTCNVDHKPSNTKVDKRVESKYGPPCPPCPAPEFLGGPSVFLFPPKPKDTLMISRTPEVTCVVVDVSQEDPEVQFNWYVDGVEVHNAKTKPREEQFNSTYRVVSVLTVLHQDWLNGKEYKCKVSNKGLPSSIEKTISKAKGQPREPQVYTLPPSQEEMTKNQVSLTCLVKGFYPSDIAVEWESNGQPENNYKTTPPVLDSDGSFFLYSRLTVDKSRWQEGNVFSCSVMHEALHNHYTQKSLSLSLG

SEQ ID NO: 449 - protein, 442 aa, Artificial Sequence
  TB006 heavy chain peptide sequence
QVQLVQSGAEVKKPGASVKVSCKASGYSFTNYYMHWVRQAPGQRLEWMGWIYPGSGNTNYNEKFQGRVTITADTSASTAYMELSSLRSEDTAVYYCSTAPGGFDVWGQGTTVTVSSASTKGPSVFPLAPCSRSTSESTAALGCLVKDYFPEPVTVSWNSGALTSGVHTFPAVLQSSGLYSLSSVVTVPSSSLGTKTYTCNVDHKPSNTKVDKRVESKYGPPCPPCPAPEFLGGPSVFLFPPKPKDTLMISRTPEVTCVVVDVSQEDPEVQFNWYVDGVEVHNAKTKPREEQFNSTYRVVSVLTVLHQDWLNGKEYKCKVSNKGLPSSIEKTISKAKGQPREPQVYTLPPSQEEMTKNQVSLTCLVKGFYPSDIAVEWESNGQPENNYKTTPPVLDSDGSFFLYSRLTVDKSRWQEGNVFSCSVMHEALHNHYTQKSLSLSLG

SEQ ID NO: 450 - protein, 452 aa, Artificial Sequence
  12G5.D7 heavy chain peptide sequence
QVQLKQSGAELVRPGASVKLSCKASGYTFTDYYINWVKQRPGQGLEWIARIYPGTGNTDYNEKFKGRATLTAEKSSSTAYMQLSSLTSEDSAVYFCARFAYYYGSGGYFDYWGHGTTLTVSSAKTTPPSVYPLAPVCGDTTGSSVTLGCLVKGYFPEPVTLTWNSGSLSSGVHTFPAVLQSDLYTLSSSVTVTSSTWPSQSITCNVAHPASSTKVDKKIEPRGPTIKPCPPCKCPAPNAAGGPSVFIFPPKIKDVLMISLSPIVTCVVVDVSEDDPDVQISWFVNNVEVHTAQTQTHREDYNSTLRVVSALPIQHQDWMSGKEFKCKVNNKDLGAPIERTISKPKGSVRAPQVYVLPPPEEEMTKKQVTLTCMVTDFMPEDIYVEWTNNGKTELNYKNTEPVLDSDGSYFMYSKLRVEKKNWVERNSYSCSVVHEGLHNHHTTKSFSRTPGK

SEQ ID NO: 451 - protein, 449 aa, Artificial Sequence
  13A12.2E5 heavy chain peptide sequence
QIQLVQSGPELKKPGETVKISCKTSGYKFKTYVMSWVKQAPGKALKWMGWINTYSGVPTYADDFKGRFAFSLETSASTAYLEIINLKNEDTATYFCARDGNYGDPMDYWGQGTSVTVSSAKTTPPSVYPLAPVCGDTTGSSVTLGCLVKGYFPEPVTLTWNSGSLSSGVHTFPAVLQSDLYTLSSSVTVTSSTWPSQSITCNVAHPASSTKVDKKIEPRGPTIKPCPPCKCPAPNAAGGPSVFIFPPKIKDVLMISLSPIVTCVVVDVSEDDPDVQISWFVNNVEVHTAQTQTHREDYNSTLRVVSALPIQHQDWMSGKEFKCKVNNKDLGAPIERTISKPKGSVRAPQVYVLPPPEEEMTKKQVTLTCMVTDFMPEDIYVEWTNNGKTELNYKNTEPVLDSDGSYFMYSKLRVEKKNWVERNSYSCSVVHEGLHNHHTTKSFSRTPGK

SEQ ID NO: 452 - protein, 447 aa, Artificial Sequence
  14H10.2C9 heavy chain peptide sequence
QIQLVQSGPELKKPGETVKISCKASGYTFTTYGMGWVKQAPGKDLKWMGWINTYSGVPTYADDFKGRFAFSLETSASTAYLQISNLKNEDTATYFCSTPYEYDGAYWGQGTLVTVSAAKTTPPSVYPLAPVCGDTTGSSVTLGCLVKGYFPEPVTLTWNSGSLSSGVHTFPAVLQSDLYTLSSSVTVTSSTWPSQSITCNVAHPASSTKVDKKIEPRGPTIKPCPPCKCPAPNAAGGPSVFIFPPKIKDVLMISLSPIVTCVVVDVSEDDPDVQISWFVNNVEVHTAQTQTHREDYNSTLRVVSALPIQHQDWMSGKEFKCKVNNKDLGAPIERTISKPKGSVRAPQVYVLPPPEEEMTKKQVTLTCMVTDFMPEDIYVEWTNNGKTELNYKNTEPVLDSDGSYFMYSKLRVEKKNWVERNSYSCSVVHEGLHNHHTTKSFSRTPGK

SEQ ID NO: 453 - protein, 443 aa, Artificial Sequence
  15F10.2D6 heavy chain peptide sequence
EVQLVESGGGLVKPGGSLKLSCAASGFAFSSYAMSWVRQTPEKRLEWVATISDGGVYTYYTDHVKGRFTISRDNAEDNLYLQMSHLKSEDTAMYYCVRDGGYWGQGTTLTVSSAKTTPPSVYPLAPVCGDTTGSSVTLGCLVKGYFPEPVTLTWNSGSLSSGVHTFPAVLQSDLYTLSSSVTVTSSTWPSQSITCNVAHPASSTKVDKKIEPRGPTIKPCPPCKCPAPNAAGGPSVFIFPPKIKDVLMISLSPIVTCVVVDVSEDDPDVQISWFVNNVEVHTAQTQTHREDYNSTLRVVSALPIQHQDWMSGKEFKCKVNNKDLGAPIERTISKPKGSVRAPQVYVLPPPEEEMTKKQVTLTCMVTDFMPEDIYVEWTNNGKTELNYKNTEPVLDSDGSYFMYSKLRVEKKNWVERNSYSCSVVHEGLHNHHTTKSFSRTPGK

SEQ ID NO: 454 - protein, 446 aa, Artificial Sequence
  19B5.2E6 heavy chain peptide sequence
QIQLVQSGPELKKPGETVKISCKASGYTFTTYAMSWVKQAPGKGLKWMGWINTYSGVPTYADDLKGRFAFSLETSASTAYLQINNLKNEDTATYFCARGPYAMDYWGQGTSVTVSSAKTTPPSVYPLAPVCGDTTGSSVTLGCLVKGYFPEPVTLTWNSGSLSSGVHTFPAVLQSDLYTLSSSVTVTSSTWPSQSITCNVAHPASSTKVDKKIEPRGPTIKPCPPCKCPAPNAAGGPSVFIFPPKIKDVLMISLSPIVTCVVVDVSEDDPDVQISWFVNNVEVHTAQTQTHREDYNSTLRVVSALPIQHQDWMSGKEFKCKVNNKDLGAPIERTISKPKGSVRAPQVYVLPPPEEEMTKKQVTLTCMVTDFMPEDIYVEWTNNGKTELNYKNTEPVLDSDGSYFMYSKLRVEKKNWVERNSYSCSVVHEGLHNHHTTKSFSRTPGK

SEQ ID NO: 455 - protein, 445 aa, Artificial Sequence
  20D11.2C6 heavy chain peptide sequence
EVQLQQSGPELVKPGASVKISCKASGYTFTDFYINWVKQSHGKSLEWIGDINPKNGGINYNPKFKIKATLTVDKSSSTSYMDLRGLTSEDSAVYYCTSGYGFPYWGQGTLVTVSAAKTTPPSVYPLAPVCGDTTGSSVTLGCLVKGYFPEPVTLTWNSGSLSSGVHTFPAVLQSDLYTLSSSVTVTSSTWPSQSITCNVAHPASSTKVDKKIEPRGPTIKPCPPCKCPAPNAAGGPSVFIFPPKIKDVLMISLSPIVTCVVVDVSEDDPDVQISWFVNNVEVHTAQTQTHREDYNSTLRVVSALPIQHQDWMSGKEFKCKVNNKDLGAPIERTISKPKGSVRAPQVYVLPPPEEEMTKKQVTLTCMVTDFMPEDIYVEWTNNGKTELNYKNTEPVLDSDGSYFMYSKLRVEKKNWVERNSYSCSVVHEGLHNHHTTKSFSRTPGK

SEQ ID NO: 456 - protein, 446 aa, Artificial Sequence
  20H5.A3 heavy chain peptide sequence
QIQLVQSGPELKKPGESVKISCKASGYAFTTYGMSWVQQAPGKGLKWMGWVNTYSGVPTCADDFKGRFAFSLETSASTAYLQINNLRNEDTATYFCARGPYAMDYWGQGTSVTVSSAKTTPPSVYPLAPVCGDTTGSSVTLGCLVKGYFPEPVTLTWNSGSLSSGVHTFPAVLQSDLYTLSSSVTVTSSTWPSQSITCNVAHPASSTKVDKKIEPRGPTIKPCPPCKCPAPNAAGGPSVFIFPPKIKDVLMISLSPIVTCVVVDVSEDDPDVQISWFVNNVEVHTAQTQTHREDYNSTLRVVSALPIQHQDWMSGKEFKCKVNNKDLGAPIERTISKPKGSVRAPQVYVLPPPEEEMTKKQVTLTCMVTDFMPEDIYVEWTNNGKTELNYKNTEPVLDSDGSYFMYSKLRVEKKNWVERNSYSCSVVHEGLHNHHTTKSFSRTPGK

SEQ ID NO: 457 - protein, 446 aa, Artificial Sequence; identical to SEQ ID NO: 454
  23H9.2E4 heavy chain peptide sequence

SEQ ID NO: 458 - protein, 450 aa, Artificial Sequence
  2D10.2B2 heavy chain peptide sequence
QVQLQQSGPELVKPGASVKISCKASGYTFTDYYINWVKQRPGQGLEWIGWIYPGSNDTKYNEKFKGKATLTVDTSSSTAYMQLGSLTSEDSAVYFCANYFGCSGWFFDVWGTGTTVTVSSAKTTPPSVYPLAPVCGDTTGSSVTLGCLVKGYFPEPVTLTWNSGSLSSGVHTFPAVLQSDLYTLSSSVTVTSSTWPSQSITCNVAHPASSTKVDKKIEPRGPTIKPCPPCKCPAPNAAGGPSVFIFPPKIKDVLMISLSPIVTCVVVDVSEDDPDVQISWFVNNVEVHTAQTQTHREDYNSTLRVVSALPIQHQDWMSGKEFKCKVNNKDLGAPIERTISKPKGSVRAPQVYVLPPPEEEMTKKQVTLTCMVTDFMPEDIYVEWTNNGKTELNYKNTEPVLDSDGSYFMYSKLRVEKKNWVERNSYSCSVVHEGLHNHHTTKSFSRTPGK

SEQ ID NO: 459 - protein, 449 aa, Artificial Sequence; identical to SEQ ID NO: 451
  3B11.2G2 heavy chain peptide sequence

SEQ ID NO: 460 - protein, 443 aa, Artificial Sequence
  7D8.2D8 heavy chain peptide sequence
EVQLVESGGGLVKPGGSLKLSCAASGFTFSSYAMSWVRQTPEKRLEWVATISDGGIYTYYPDNVKGRFTISRDNAKNNLFLQMSHLKSEDTAMYYCVRDGGYWGQGTTLTVSSAKTTPPSVYPLAPVCGDTTGSSVTLGCLVKGYFPEPVTLTWNSGSLSSGVHTFPAVLQSDLYTLSSSVTVTSSTWPSQSITCNVAHPASSTKVDKKIEPRGPTIKPCPPCKCPAPNAAGGPSVFIFPPKIKDVLMISLSPIVTCVVVDVSEDDPDVQISWFVNNVEVHTAQTQTHREDYNSTLRVVSALPIQHQDWMSGKEFKCKVNNKDLGAPIERTISKPKGSVRAPQVYVLPPPEEEMTKKQVTLTCMVTDFMPEDIYVEWTNNGKTELNYKNTEPVLDSDGSYFMYSKLRVEKKNWVERNSYSCSVVHEGLHNHHTTKSFSRTPGK

SEQ ID NO: 461 - protein, 446 aa, Artificial Sequence
  mTB001 heavy chain peptide sequence
QIQLVQSGPELKKPGETVKISCKASGYTFTNYGMNWVKQAPGKGLKWMGWINTNTGEPTYVEEFKGRFAFSLETSASTAYLQINNLKNEDTATYFCAPYDNFFAYWGQGTLVTVSAAKTTPPSVYPLAPVCGDTTGSSVTLGCLVKGYFPEPVTLTWNSGSLSSGVHTFPAVLQSDLYTLSSSVTVTSSTWPSQSITCNVAHPASSTKVDKKIEPRGPTIKPCPPCKCPAPNAAGGPSVFIFPPKIKDVLMISLSPIVTCVVVDVSEDDPDVQISWFVNNVEVHTAQTQTHREDYNSTLRVVSALPIQHQDWMSGKEFKCKVNNKDLGAPIERTISKPKGSVRAPQVYVLPPPEEEMTKKQVTLTCMVTDFMPEDIYVEWTNNGKTELNYKNTEPVLDSDGSYFMYSKLRVEKKNWVERNSYSCSVVHEGLHNHHTTKSFSRTPGK

SEQ ID NO: 462 - protein, 442 aa, Artificial Sequence
  4A11.2B5 heavy chain peptide sequence
QVQLQQSGPELVKPGASVKISCKASGYSFTNYYIHWVKQRPGQGLEWIGWIYPGSGNTNYNEKFKGKATLTADTSSSTTNMQLSSLTSEDSAVYYCSTAPGGFDVWGSGTTVTVSSASTKGPSVFPLAPCSRSTSESTAALGCLVKDYFPEPVTVSWNSGALTSGVHTFPAVLQSSGLYSLSSVVTVPSSSLGTKTYTCNVDHKPSNTKVDKRVESKYGPPCPPCPAPEFLGGPSVFLFPPKPKDTLMISRTPEVTCVVVDVSQEDPEVQFNWYVDGVEVHNAKTKPREEQFNSTYRVVSVLTVLHQDWLNGKEYKCKVSNKGLPSSIEKTISKAKGQPREPQVYTLPPSQEEMTKNQVSLTCLVKGFYPSDIAVEWESNGQPENNYKTTPPVLDSDGSFFLYSRLTVDKSRWQEGNVFSCSVMHEALHNHYTQKSLSLSLG

SEQ ID NO: 463 - protein, 442 aa, Artificial Sequence
  4A11.H1L1 heavy chain peptide sequence
QVQLVQSGAEVKKPGASVKVSCKASGYSFTNYYMHWVRQAPGQGLEWMGWIYPGSGNTNYNEKFQGRVTMTADTSISTAYMELSRLRSDDTAVYYCSTAPGGFDVWGQGTTVTVSSASTKGPSVFPLAPCSRSTSESTAALGCLVKDYFPEPVTVSWNSGALTSGVHTFPAVLQSSGLYSLSSVVTVPSSSLGTKTYTCNVDHKPSNTKVDKRVESKYGPPCPPCPAPEFLGGPSVFLFPPKPKDTLMISRTPEVTCVVVDVSQEDPEVQFNWYVDGVEVHNAKTKPREEQFNSTYRVVSVLTVLHQDWLNGKEYKCKVSNKGLPSSIEKTISKAKGQPREPQVYTLPPSQEEMTKNQVSLTCLVKGFYPSDIAVEWESNGQPENNYKTTPPVLDSDGSFFLYSRLTVDKSRWQEGNVFSCSVMHEALHNHYTQKSLSLSLG

SEQ ID NO: 464 - protein, 442 aa, Artificial Sequence
  4A11.H4L2 heavy chain peptide sequence
QVQLVQSGAEVKKPGASVKVSCKASGYSFTNYYIHWVRQAPGQRLEWMGWIYPGSGNTNYNEKFQGRVTLTADTSASTTYMELSSLRSEDTAVYYCSTAPGGFDVWGQGTTVTVSSASTKGPSVFPLAPCSRSTSESTAALGCLVKDYFPEPVTVSWNSGALTSGVHTFPAVLQSSGLYSLSSVVTVPSSSLGTKTYTCNVDHKPSNTKVDKRVESKYGPPCPPCPAPEFLGGPSVFLFPPKPKDTLMISRTPEVTCVVVDVSQEDPEVQFNWYVDGVEVHNAKTKPREEQFNSTYRVVSVLTVLHQDWLNGKEYKCKVSNKGLPSSIEKTISKAKGQPREPQVYTLPPSQEEMTKNQVSLTCLVKGFYPSDIAVEWESNGQPENNYKTTPPVLDSDGSFFLYSRLTVDKSRWQEGNVFSCSVMHEALHNHYTQKSLSLSLG

SEQ ID NO: 465 - protein, 445 aa, Artificial Sequence
  4G2.2G6 heavy chain peptide sequence
QIQLVQSGPDLKKPGETVKISCKASGYTFTTYVMSWVKQAPGKDLKWMGWINTHSGVPTYADDFKGRFDFSLETSANTAFLQINNLKNEDTATYFCTRDGNDGDAMDNWGQGTSVTVSSASTKGPSVFPLAPCSRSTSESTAALGCLVKDYFPEPVTVSWNSGALTSGVHTFPAVLQSSGLYSLSSVVTVPSSSLGTKTYTCNVDHKPSNTKVDKRVESKYGPPCPPCPAPEFLGGPSVFLFPPKPKDTLMISRTPEVTCVVVDVSQEDPEVQFNWYVDGVEVHNAKTKPREEQFNSTYRVVSVLTVLHQDWLNGKEYKCKVSNKGLPSSIEKTISKAKGQPREPQVYTLPPSQEEMTKNQVSLTCLVKGFYPSDIAVEWESNGQPENNYKTTPPVLDSDGSFFLYSRLTVDKSRWQEGNVFSCSVMHEALHNHYTQKSLSLSLG

SEQ ID NO: 466 - protein, 446 aa, Artificial Sequence
  6B3.2D3 heavy chain peptide sequence
QVQLKQSGPGLVQPSQSLSITCTVSGFSLTSYGVHWVRQPPGKGLEWLGVIWSGGSTDYNAAFISRLSISKDNSKSQVFFKMNSLQADDTAIYYCAKGPYDYDLGWFAYWGQGTLVTVSAASTKGPSVFPLAPCSRSTSESTAALGCLVKDYFPEPVTVSWNSGALTSGVHTFPAVLQSSGLYSLSSVVTVPSSSLGTKTYTCNVDHKPSNTKVDKRVESKYGPPCPPCPAPEFLGGPSVFLFPPKPKDTLMISRTPEVTCVVVDVSQEDPEVQFNWYVDGVEVHNAKTKPREEQFNSTYRVVSVLTVLHQDWLNGKEYKCKVSNKGLPSSIEKTISKAKGQPREPQVYTLPPSQEEMTKNQVSLTCLVKGFYPSDIAVEWESNGQPENNYKTTPPVLDSDGSFFLYSRLTVDKSRWQEGNVFSCSVMHEALHNHYTQKSLSLSLG

SEQ ID NO: 467 - protein, 442 aa, Artificial Sequence
  6H6.2D6 heavy chain peptide sequence
QIQLVQSGPELKKPGETVKISCKASGYTFTTYGMSWVKQAPGKGLKWMAWINTYSGVPTYADDFKGRFAFSLETSASTAYLQINNLTNEDTATYFCARGPYAMDYWGQGTSVTVSSASTKGPSVFPLAPCSRSTSESTAALGCLVKDYFPEPVTVSWNSGALTSGVHTFPAVLQSSGLYSLSSVVTVPSSSLGTKTYTCNVDHKPSNTKVDKRVESKYGPPCPPCPAPEFLGGPSVFLFPPKPKDTLMISRTPEVTCVVVDVSQEDPEVQFNWYVDGVEVHNAKTKPREEQFNSTYRVVSVLTVLHQDWLNGKEYKCKVSNKGLPSSIEKTISKAKGQPREPQVYTLPPSQEEMTKNQVSLTCLVKGFYPSDIAVEWESNGQPENNYKTTPPVLDSDGSFFLYSRLTVDKSRWQEGNVFSCSVMHEALHNHYTQKSLSLSLG

SEQ ID NO: 468 - protein, 441 aa, Artificial Sequence
  9H2.2H10 heavy chain peptide sequence
QVQLQQPGAELVGPGSSVKLSCKASGYTFTNYWIHWVKQRPLQGLEWIGNIDPSDSETHYNQKFKDKATLTVDKSSSTAYMQLSSLTSEDSAVYYCARHGYYDYWGQGTTLTVSSASTKGPSVFPLAPCSRSTSESTAALGCLVKDYFPEPVTVSWNSGALTSGVHTFPAVLQSSGLYSLSSVVTVPSSSLGTKTYTCNVDHKPSNTKVDKRVESKYGPPCPPCPAPEFLGGPSVFLFPPKPKDTLMISRTPEVTCVVVDVSQEDPEVQFNWYVDGVEVHNAKTKPREEQFNSTYRVVSVLTVLHQDWLNGKEYKCKVSNKGLPSSIEKTISKAKGQPREPQVYTLPPSQEEMTKNQVSLTCLVKGFYPSDIAVEWESNGQPENNYKTTPPVLDSDGSFFLYSRLTVDKSRWQEGNVFSCSVMHEALHNHYTQKSLSLSLG

SEQ ID NO: 469 - protein, 445 aa, Artificial Sequence
  13G4.2F8 heavy chain peptide sequence
QVQLQQPGAELVKPGASVKLSCKASGYTFTSYWMHWVKQRPGQGLEWIGMIHPNSGSTDYNEKFKNKATLNVDKSSSTAYIQLSSLTSEDSAVYYCTRWGIYYYARDYWGQGTTLTVSSASTKGPSVFPLAPCSRSTSESTAALGCLVKDYFPEPVTVSWNSGALTSGVHTFPAVLQSSGLYSLSSVVTVPSSSLGTKTYTCNVDHKPSNTKVDKRVESKYGPPCPPCPAPEFLGGPSVFLFPPKPKDTLMISRTPEVTCVVVDVSQEDPEVQFNWYVDGVEVHNAKTKPREEQFNSTYRVVSVLTVLHQDWLNGKEYKCKVSNKGLPSSIEKTISKAKGQPREPQVYTLPPSQEEMTKNQVSLTCLVKGFYPSDIAVEWESNGQPENNYKTTPPVLDSDGSFFLYSRLTVDKSRWQEGNVFSCSVMHEALHNHYTQKSLSLSLG

SEQ ID NO: 470 - protein, 443 aa, Artificial Sequence
  13H12.2F8 heavy chain peptide sequence
QIQLVQSGPELKKPGETVKISCKASGYTFTTYGMSWVKQAPGKGLKWMGWINTYSGVPTYADDFKGRFAFSLETSASTAYLQINNLKNEDTATYFCAVPYEYDGAYWGQGTLVTVSAASTKGPSVFPLAPCSRSTSESTAALGCLVKDYFPEPVTVSWNSGALTSGVHTFPAVLQSSGLYSLSSVVTVPSSSLGTKTYTCNVDHKPSNTKVDKRVESKYGPPCPPCPAPEFLGGPSVFLFPPKPKDTLMISRTPEVTCVVVDVSQEDPEVQFNWYVDGVEVHNAKTKPREEQFNSTYRVVSVLTVLHQDWLNGKEYKCKVSNKGLPSSIEKTISKAKGQPREPQVYTLPPSQEEMTKNQVSLTCLVKGFYPSDIAVEWESNGQPENNYKTTPPVLDSDGSFFLYSRLTVDKSRWQEGNVFSCSVMHEALHNHYTQKSLSLSLG

SEQ ID NO: 471 - protein, 441 aa, Artificial Sequence
  15G7.2A7 heavy chain peptide sequence
EVQLQQSGPELVKPGASVKISCKASGYTFTDYYMNWVKQSHGKSLEWIGDINPNNGGTNYNQKFKGKATLTVDKSSSTAYMELRSLTSEDSAVYYCTSGYGFPYWGQGTLVTVSAASTKGPSVFPLAPCSRSTSESTAALGCLVKDYFPEPVTVSWNSGALTSGVHTFPAVLQSSGLYSLSSVVTVPSSSLGTKTYTCNVDHKPSNTKVDKRVESKYGPPCPPCPAPEFLGGPSVFLFPPKPKDTLMISRTPEVTCVVVDVSQEDPEVQFNWYVDGVEVHNAKTKPREEQFNSTYRVVSVLTVLHQDWLNGKEYKCKVSNKGLPSSIEKTISKAKGQPREPQVYTLPPSQEEMTKNQVSLTCLVKGFYPSDIAVEWESNGQPENNYKTTPPVLDSDGSFFLYSRLTVDKSRWQEGNVFSCSVMHEALHNHYTQKSLSLSLG

SEQ ID NO: 472 - protein, 443 aa, Artificial Sequence
  19D9.2E5 heavy chain peptide sequence
QIQLVQSGPELKKPGETVKISCKASGYTFTTYGMGWVKQAPGKGLKWMGWINTYSGVPTYADDFKGRFAFSLETSTSTAYLQINNLKNEDMATYFCATPYEYDGAYWGQGTLVTVSAASTKGPSVFPLAPCSRSTSESTAALGCLVKDYFPEPVTVSWNSGALTSGVHTFPAVLQSSGLYSLSSVVTVPSSSLGTKTYTCNVDHKPSNTKVDKRVESKYGPPCPPCPAPEFLGGPSVFLFPPKPKDTLMISRTPEVTCVVVDVSQEDPEVQFNWYVDGVEVHNAKTKPREEQFNSTYRVVSVLTVLHQDWLNGKEYKCKVSNKGLPSSIEKTISKAKGQPREPQVYTLPPSQEEMTKNQVSLTCLVKGFYPSDIAVEWESNGQPENNYKTTPPVLDSDGSFFLYSRLTVDKSRWQEGNVFSCSVMHEALHNHYTQKSLSLSLG

SEQ ID NO: 473 - protein, 438 aa, Artificial Sequence
  23B10.2B12 heavy chain peptide sequence
QVQLQQSGPELVKPGDSVKISCKAAGYTFSDYYINWVKQRPGQGLEWIGWIYPVSVNTKYNEKFKGKATLTVDTSSSTAYMQLSSLTSEDSGVYFCAYLDYWGQGTLVTVSAASTKGPSVFPLAPCSRSTSESTAALGCLVKDYFPEPVTVSWNSGALTSGVHTFPAVLQSSGLYSLSSVVTVPSSSLGTKTYTCNVDHKPSNTKVDKRVESKYGPPCPPCPAPEFLGGPSVFLFPPKPKDTLMISRTPEVTCVVVDVSQEDPEVQFNWYVDGVEVHNAKTKPREEQFNSTYRVVSVLTVLHQDWLNGKEYKCKVSNKGLPSSIEKTISKAKGQPREPQVYTLPPSQEEMTKNQVSLTCLVKGFYPSDIAVEWESNGQPENNYKTTPPVLDSDGSFFLYSRLTVDKSRWQEGNVFSCSVMHEALHNHYTQKSLSLSLG

SEQ ID NO: 474 - protein, 446 aa, Artificial Sequence
  24D12.2H9 heavy chain peptide sequence
QVQLKQSGPGLVQPSQSLSITCTVSGFSLTSYGVHWVRQAPGKGLEWLGVIWSGGSTDYNAAFMSRLSISKDNSKSQVFFKMNSLQADDTAIYYCAKSPDGYDVAWFGYWGQGTLVTVSAASTKGPSVFPLAPCSRSTSESTAALGCLVKDYFPEPVTVSWNSGALTSGVHTFPAVLQSSGLYSLSSVVTVPSSSLGTKTYTCNVDHKPSNTKVDKRVESKYGPPCPPCPAPEFLGGPSVFLFPPKPKDTLMISRTPEVTCVVVDVSQEDPEVQFNWYVDGVEVHNAKTKPREEQFNSTYRVVSVLTVLHQDWLNGKEYKCKVSNKGLPSSIEKTISKAKGQPREPQVYTLPPSQEEMTKNQVSLTCLVKGFYPSDIAVEWESNGQPENNYKTTPPVLDSDGSFFLYSRLTVDKSRWQEGNVFSCSVMHEALHNHYTQKSLSLSLG

SEQ ID NO: 475 - protein, 448 aa, Artificial Sequence
  F846C.1B2 heavy chain peptide sequence
QIQLVQSGPELKKPGETVKISCKASGYTFTNYGMNWVKQAPGKGLKWMGWINTYTGEPSYADDFKGRFAFSLETSASTAYLQINNLKNEDMATYFCARWGGYAGDYYAMDFWGQGTSVTVSSASTKGPSVFPLAPCSRSTSESTAALGCLVKDYFPEPVTVSWNSGALTSGVHTFPAVLQSSGLYSLSSVVTVPSSSLGTKTYTCNVDHKPSNTKVDKRVESKYGPPCPPCPAPEFLGGPSVFLFPPKPKDTLMISRTPEVTCVVVDVSQEDPEVQFNWYVDGVEVHNAKTKPREEQFNSTYRVVSVLTVLHQDWLNGKEYKCKVSNKGLPSSIEKTISKAKGQPREPQVYTLPPSQEEMTKNQVSLTCLVKGFYPSDIAVEWESNGQPENNYKTTPPVLDSDGSFFLYSRLTVDKSRWQEGNVFSCSVMHEALHNHYTQKSLSLSLG

SEQ ID NO: 476 - protein, 448 aa, Artificial Sequence
  F846C.1F5 heavy chain peptide sequence
QIQLVQSGPELKKPGETVKISCKASGYTFTNYGMNWVKQAPGKGLKWMGWINTYTGEPSYADDFKGRFAFSLETSASTAYLQINNLKNEDMATYFCARWGGYDGDYYAMDYWGQGTSVTVSSASTKGPSVFPLAPCSRSTSESTAALGCLVKDYFPEPVTVSWNSGALTSGVHTFPAVLQSSGLYSLSSVVTVPSSSLGTKTYTCNVDHKPSNTKVDKRVESKYGPPCPPCPAPEFLGGPSVFLFPPKPKDTLMISRTPEVTCVVVDVSQEDPEVQFNWYVDGVEVHNAKTKPREEQFNSTYRVVSVLTVLHQDWLNGKEYKCKVSNKGLPSSIEKTISKAKGQPREPQVYTLPPSQEEMTKNQVSLTCLVKGFYPSDIAVEWESNGQPENNYKTTPPVLDSDGSFFLYSRLTVDKSRWQEGNVFSCSVMHEALHNHYTQKSLSLSLG

SEQ ID NO: 477 - protein, 448 aa, Artificial Sequence
  F846C.1H12 heavy chain peptide sequence
QIQLVQSGPELKKPGETVKISCKASGYTFTNFGMNWVKQAPGKGLKWMGWINTYTGEPSYADDFKGRFAFSLETSASTAYLQINNLKNEDIATYFCARWGGYAGDYYAMDYWGQGTSVTVSSASTKGPSVFPLAPCSRSTSESTAALGCLVKDYFPEPVTVSWNSGALTSGVHTFPAVLQSSGLYSLSSVVTVPSSSLGTKTYTCNVDHKPSNTKVDKRVESKYGPPCPPCPAPEFLGGPSVFLFPPKPKDTLMISRTPEVTCVVVDVSQEDPEVQFNWYVDGVEVHNAKTKPREEQFNSTYRVVSVLTVLHQDWLNGKEYKCKVSNKGLPSSIEKTISKAKGQPREPQVYTLPPSQEEMTKNQVSLTCLVKGFYPSDIAVEWESNGQPENNYKTTPPVLDSDGSFFLYSRLTVDKSRWQEGNVFSCSVMHEALHNHYTQKSLSLSLG

SEQ ID NO: 478 - protein, 442 aa, Artificial Sequence
  F846C.1H5 heavy chain peptide sequence
EVQLLESGGGLVKPGGSLKLSCAASGFTFSSYAMSWVRQTPEKRLEWVASISSGGDTYYPDSVKGRFTISRDNARNILYLQMSSLRSEDTAMYYCASYGNSLFDYWGQGTTLTVSSASTKGPSVFPLAPCSRSTSESTAALGCLVKDYFPEPVTVSWNSGALTSGVHTFPAVLQSSGLYSLSSVVTVPSSSLGTKTYTCNVDHKPSNTKVDKRVESKYGPPCPPCPAPEFLGGPSVFLFPPKPKDTLMISRTPEVTCVVVDVSQEDPEVQFNWYVDGVEVHNAKTKPREEQFNSTYRVVSVLTVLHQDWLNGKEYKCKVSNKGLPSSIEKTISKAKGQPREPQVYTLPPSQEEMTKNQVSLTCLVKGFYPSDIAVEWESNGQPENNYKTTPPVLDSDGSFFLYSRLTVDKSRWQEGNVFSCSVMHEALHNHYTQKSLSLSLG

SEQ ID NO: 479 - protein, 448 aa, Artificial Sequence; identical to SEQ ID NO: 476
  F846C.2H3 heavy chain peptide sequence

SEQ ID NO: 480 - protein, 440 aa, Artificial Sequence
  F846TC.14A2 heavy chain peptide sequence
QIQLVQSGPELKKPGETVKISCKASGYTFTNYGMNWVKQAPGKGLKWMGWINTYTGEPTYAGDLKGRFAFSLETSASTAYLQINNLKNEDTATYFCVRYTMDYWGQGTSVTVSSASTKGPSVFPLAPCSRSTSESTAALGCLVKDYFPEPVTVSWNSGALTSGVHTFPAVLQSSGLYSLSSVVTVPSSSLGTKTYTCNVDHKPSNTKVDKRVESKYGPPCPPCPAPEFLGGPSVFLFPPKPKDTLMISRTPEVTCVVVDVSQEDPEVQFNWYVDGVEVHNAKTKPREEQFNSTYRVVSVLTVLHQDWLNGKEYKCKVSNKGLPSSIEKTISKAKGQPREPQVYTLPPSQEEMTKNQVSLTCLVKGFYPSDIAVEWESNGQPENNYKTTPPVLDSDGSFFLYSRLTVDKSRWQEGNVFSCSVMHEALHNHYTQKSLSLSLG

SEQ ID NO: 481 - protein, 450 aa, Artificial Sequence
  F846TC.14E4 heavy chain peptide sequence
QVTLKESGPGILQPSQTLSLTCSFSGFSLSTSGMGVGWIRQPSGKGLEWLAHIWWDDDKYYNTALKSGLTISKDASKNQVFLKIASMDTADTATYYCARNLYDGSYGYYAMDYWGQGTSVTVSSASTKGPSVFPLAPCSRSTSESTAALGCLVKDYFPEPVTVSWNSGALTSGVHTFPAVLQSSGLYSLSSVVTVPSSSLGTKTYTCNVDHKPSNTKVDKRVESKYGPPCPPCPAPEFLGGPSVFLFPPKPKDTLMISRTPEVTCVVVDVSQEDPEVQFNWYVDGVEVHNAKTKPREEQFNSTYRVVSVLTVLHQDWLNGKEYKCKVSNKGLPSSIEKTISKAKGQPREPQVYTLPPSQEEMTKNQVSLTCLVKGFYPSDIAVEWESNGQPENNYKTTPPVLDSDGSFFLYSRLTVDKSRWQEGNVFSCSVMHEALHNHYTQKSLSLSLG

SEQ ID NO: 482 - protein, 448 aa, Artificial Sequence
  F846TC.16B5 heavy chain peptide sequence
QIQLVQSGPELKKPGETVKISCKASGYTFTNYGMNWVKQAPGKGLKWMGWINTYTGEPAYADDFKGRFAFSLETSASTAYLQINNLKNEDMATYFCARWGGYDGDYYAMDYWGQGTSVTVSSASTKGPSVFPLAPCSRSTSESTAALGCLVKDYFPEPVTVSWNSGALTSGVHTFPAVLQSSGLYSLSSVVTVPSSSLGTKTYTCNVDHKPSNTKVDKRVESKYGPPCPPCPAPEFLGGPSVFLFPPKPKDTLMISRTPEVTCVVVDVSQEDPEVQFNWYVDGVEVHNAKTKPREEQFNSTYRVVSVLTVLHQDWLNGKEYKCKVSNKGLPSSIEKTISKAKGQPREPQVYTLPPSQEEMTKNQVSLTCLVKGFYPSDIAVEWESNGQPENNYKTTPPVLDSDGSFFLYSRLTVDKSRWQEGNVFSCSVMHEALHNHYTQKSLSLSLG

SEQ ID NO: 483 - protein, 449 aa, Artificial Sequence
  F846TC.7F10 heavy chain peptide sequence
EVQLVESGGDLVKPGGSLKLSCAASGFTFSNYGLSWIRQTPDKRLEWVATISSGGSYTYYPDSVKGRFTISRDSAKNTLYLQMSSLKSEDTAMYYCARHAHYYGVSPYYFDYWGQGTCLTVSSASTKGPSVFPLAPCSRSTSESTAALGCLVKDYFPEPVTVSWNSGALTSGVHTFPAVLQSSGLYSLSSVVTVPSSSLGTKTYTCNVDHKPSNTKVDKRVESKYGPPCPPCPAPEFLGGPSVFLFPPKPKDTLMISRTPEVTCVVVDVSQEDPEVQFNWYVDGVEVHNAKTKPREEQFNSTYRVVSVLTVLHQDWLNGKEYKCKVSNKGLPSSIEKTISKAKGQPREPQVYTLPPSQEEMTKNQVSLTCLVKGFYPSDIAVEWESNGQPENNYKTTPPVLDSDGSFFLYSRLTVDKSRWQEGNVFSCSVMHEALHNHYTQKSLSLSLG

SEQ ID NO: 484 - protein, 445 aa, Artificial Sequence
  F847C.10B9 heavy chain peptide sequence
QIQLVQSGPEVKKPGETVKISCKASGYIFTNYGMNWVKQAPGKGLKWMGWINTYTGEPTYTDDFKGRFAFSLETSASTAYLQINNLKNEDTATYFCAKFGNYVGAMDYWGQGTSVTVSSASTKGPSVFPLAPCSRSTSESTAALGCLVKDYFPEPVTVSWNSGALTSGVHTFPAVLQSSGLYSLSSVVTVPSSSLGTKTYTCNVDHKPSNTKVDKRVESKYGPPCPPCPAPEFLGGPSVFLFPPKPKDTLMISRTPEVTCVVVDVSQEDPEVQFNWYVDGVEVHNAKTKPREEQFNSTYRVVSVLTVLHQDWLNGKEYKCKVSNKGLPSSIEKTISKAKGQPREPQVYTLPPSQEEMTKNQVSLTCLVKGFYPSDIAVEWESNGQPENNYKTTPPVLDSDGSFFLYSRLTVDKSRWQEGNVFSCSVMHEALHNHYTQKSLSLSLG

SEQ ID NO: 485 - protein, 446 aa, Artificial Sequence
  F847C.11B1 heavy chain peptide sequence
EVQLQQSGPELVKPGASVKISCKASGNTFTDHNMHWVKQSHGKSLEWIGYIYPYNGGTGYNQKFKSKATLTVDNSSSTVYMELRSLTSEDSAVYYCARGEYDYLAWFAYWGQGTLVTVSAASTKGPSVFPLAPCSRSTSESTAALGCLVKDYFPEPVTVSWNSGALTSGVHTFPAVLQSSGLYSLSSVVTVPSSSLGTKTYTCNVDHKPSNTKVDKRVESKYGPPCPPCPAPEFLGGPSVFLFPPKPKDTLMISRTPEVTCVVVDVSQEDPEVQFNWYVDGVEVHNAKTKPREEQFNSTYRVVSVLTVLHQDWLNGKEYKCKVSNKGLPSSIEKTISKAKGQPREPQVYTLPPSQEEMTKNQVSLTCLVKGFYPSDIAVEWESNGQPENNYKTTPPVLDSDGSFFLYSRLTVDKSRWQEGNVFSCSVMHEALHNHYTQKSLSLSLG

SEQ ID NO: 486 - protein, 445 aa, Artificial Sequence
  F847C.12F12 heavy chain peptide sequence
QIQLVQSGPELKKPGETVKISCKASGYTFTNYGMNWVKQAPGKGLKWMGWINTYTGEPTYVDDFKGRFAFSLETSASTAYLRINNLKNEDTATYFCAKFGNYVGAMDYWGQGTSVTVSSASTKGPSVFPLAPCSRSTSESTAALGCLVKDYFPEPVTVSWNSGALTSGVHTFPAVLQSSGLYSLSSVVTVPSSSLGTKTYTCNVDHKPSNTKVDKRVESKYGPPCPPCPAPEFLGGPSVFLFPPKPKDTLMISRTPEVTCVVVDVSQEDPEVQFNWYVDGVEVHNAKTKPREEQFNSTYRVVSVLTVLHQDWLNGKEYKCKVSNKGLPSSIEKTISKAKGQPREPQVYTLPPSQEEMTKNQVSLTCLVKGFYPSDIAVEWESNGQPENNYKTTPPVLDSDGSFFLYSRLTVDKSRWQEGNVFSCSVMHEALHNHYTQKSLSLSLG

SEQ ID NO: 487 - protein, 445 aa, Artificial Sequence; identical to SEQ ID NO: 484
  F847C.26F5 heavy chain peptide sequence

SEQ ID NO: 488 - protein, 443 aa, Artificial Sequence
  F847C.4B10 heavy chain peptide sequence
EVQLVETGGGLVKPGGSLKLSCAASGFTFSSYAMSWVRQTPEKRLEWVASISSGGSTYYPDSVKGRFTISRDNARNILYLQMSSLRSEDTAMYYCTRFTTVVEMDYWGQGTSVTVSSASTKGPSVFPLAPCSRSTSESTAALGCLVKDYFPEPVTVSWNSGALTSGVHTFPAVLQSSGLYSLSSVVTVPSSSLGTKTYTCNVDHKPSNTKVDKRVESKYGPPCPPCPAPEFLGGPSVFLFPPKPKDTLMISRTPEVTCVVVDVSQEDPEVQFNWYVDGVEVHNAKTKPREEQFNSTYRVVSVLTVLHQDWLNGKEYKCKVSNKGLPSSIEKTISKAKGQPREPQVYTLPPSQEEMTKNQVSLTCLVKGFYPSDIAVEWESNGQPENNYKTTPPVLDSDGSFFLYSRLTVDKSRWQEGNVFSCSVMHEALHNHYTQKSLSLSLG

SEQ ID NO: 489 - protein, 438 aa, Artificial Sequence
  F849C.8D10 heavy chain peptide sequence
QVQLQQTGAELVKPGASVKLSCKASGYTFTSYWINWVKQRPGQGLEWIGNIYPGSSSIYYSEKFKSKATLTVDTSSSTAYMQLSSLTSDDSAVYYCARWGYWGQGTTLTVSSASTKGPSVFPLAPCSRSTSESTAALGCLVKDYFPEPVTVSWNSGALTSGVHTFPAVLQSSGLYSLSSVVTVPSSSLGTKTYTCNVDHKPSNTKVDKRVESKYGPPCPPCPAPEFLGGPSVFLFPPKPKDTLMISRTPEVTCVVVDVSQEDPEVQFNWYVDGVEVHNAKTKPREEQFNSTYRVVSVLTVLHQDWLNGKEYKCKVSNKGLPSSIEKTISKAKGQPREPQVYTLPPSQEEMTKNQVSLTCLVKGFYPSDIAVEWESNGQPENNYKTTPPVLDSDGSFFLYSRLTVDKSRWQEGNVFSCSVMHEALHNHYTQKSLSLSLG

SEQ ID NO: 490 - protein, 447 aa, Artificial Sequence
  F849C.8H3 heavy chain peptide sequence
QVTLKESGPGILQPSQTLSLTCSFSGFSLSTFGMGVGWIRQPSGKGLEWLAHIWWDDDKHYNPALKSRLTISKDTSKNQVFLRIANVDTADNATYYCARIDYGDYVGFAYWGQGTLVTVSAASTKGPSVFPLAPCSRSTSESTAALGCLVKDYFPEPVTVSWNSGALTSGVHTFPAVLQSSGLYSLSSVVTVPSSSLGTKTYTCNVDHKPSNTKVDKRVESKYGPPCPPCPAPEFLGGPSVFLFPPKPKDTLMISRTPEVTCVVVDVSQEDPEVQFNWYVDGVEVHNAKTKPREEQFNSTYRVVSVLTVLHQDWLNGKEYKCKVSNKGLPSSIEKTISKAKGQPREPQVYTLPPSQEEMTKNQVSLTCLVKGFYPSDIAVEWESNGQPENNYKTTPPVLDSDGSFFLYSRLTVDKSRWQEGNVFSCSVMHEALHNHYTQKSLSLSLG

SEQ ID NO: 491 - protein, 444 aa, Artificial Sequence
  846.2B11 heavy chain peptide sequence
QVQLQQSGPELVRPGALVKISCKASGYTFTSYDINWVKQRPGQGLEWIGWIYPGDGSTKYNEKFKGKATLTADKSSSTAYMQLSSLTSENSAVYFCAREAASNAMDYWGQGTSVTVSSASTKGPSVFPLAPCSRSTSESTAALGCLVKDYFPEPVTVSWNSGALTSGVHTFPAVLQSSGLYSLSSVVTVPSSSLGTKTYTCNVDHKPSNTKVDKRVESKYGPPCPPCPAPEFLGGPSVFLFPPKPKDTLMISRTPEVTCVVVDVSQEDPEVQFNWYVDGVEVHNAKTKPREEQFNSTYRVVSVLTVLHQDWLNGKEYKCKVSNKGLPSSIEKTISKAKGQPREPQVYTLPPSQEEMTKNQVSLTCLVKGFYPSDIAVEWESNGQPENNYKTTPPVLDSDGSFFLYSRLTVDKSRWQEGNVFSCSVMHEALHNHYTQKSLSLSLG

SEQ ID NO: 492 - protein, 448 aa, Artificial Sequence
  846.4D5 heavy chain peptide sequence
EVKLEESGGGLVQPGGSMKLSCVASGFTFSNYWMNWVRQSPEKGLEWVAEIRLKSNNYATHYAESVKGRFTISRDDSKSSVYLQMNNLRAEDTGIYYCTRHYGFPYWYFDVWGAGTTVTVSSASTKGPSVFPLAPCSRSTSESTAALGCLVKDYFPEPVTVSWNSGALTSGVHTFPAVLQSSGLYSLSSVVTVPSSSLGTKTYTCNVDHKPSNTKVDKRVESKYGPPCPPCPAPEFLGGPSVFLFPPKPKDTLMISRTPEVTCVVVDVSQEDPEVQFNWYVDGVEVHNAKTKPREEQFNSTYRVVSVLTVLHQDWLNGKEYKCKVSNKGLPSSIEKTISKAKGQPREPQVYTLPPSQEEMTKNQVSLTCLVKGFYPSDIAVEWESNGQPENNYKTTPPVLDSDGSFFLYSRLTVDKSRWQEGNVFSCSVMHEALHNHYTQKSLSLSLG

SEQ ID NO: 493 - protein, 444 aa, Artificial Sequence
  846T.1H2 heavy chain peptide sequence
QIQLVQSGPELKKPGETVKISCKASGYTFTNYGMNWVKQAPGKGLKWMGWINTNTGEPTYAEEFKGRFAFSLETSASTAYLQINNLKNEDTATYFCATGGGNWDFDYWGQGTTLTVSSASTKGPSVFPLAPCSRSTSESTAALGCLVKDYFPEPVTVSWNSGALTSGVHTFPAVLQSSGLYSLSSVVTVPSSSLGTKTYTCNVDHKPSNTKVDKRVESKYGPPCPPCPAPEFLGGPSVFLFPPKPKDTLMISRTPEVTCVVVDVSQEDPEVQFNWYVDGVEVHNAKTKPREEQFNSTYRVVSVLTVLHQDWLNGKEYKCKVSNKGLPSSIEKTISKAKGQPREPQVYTLPPSQEEMTKNQVSLTCLVKGFYPSDIAVEWESNGQPENNYKTTPPVLDSDGSFFLYSRLTVDKSRWQEGNVFSCSVMHEALHNHYTQKSLSLSLG

SEQ ID NO: 494 - protein, 440 aa, Artificial Sequence
  847.14H4 heavy chain peptide sequence
QIQLVQSGPELTKPGETVKISCKASGYTFTDYGMNWVRQAPGETLKWMGWINTYTGEPTYADDFKGRFAFSLESSASTAYLQINNLKNEDVATYFCARYPMDYWGQGTSVTVSSASTKGPSVFPLAPCSRSTSESTAALGCLVKDYFPEPVTVSWNSGALTSGVHTFPAVLQSSGLYSLSSVVTVPSSSLGTKTYTCNVDHKPSNTKVDKRVESKYGPPCPPCPAPEFLGGPSVFLFPPKPKDTLMISRTPEVTCVVVDVSQEDPEVQFNWYVDGVEVHNAKTKPREEQFNSTYRVVSVLTVLHQDWLNGKEYKCKVSNKGLPSSIEKTISKAKGQPREPQVYTLPPSQEEMTKNQVSLTCLVKGFYPSDIAVEWESNGQPENNYKTTPPVLDSDGSFFLYSRLTVDKSRWQEGNVFSCSVMHEALHNHYTQKSLSLSLG

SEQ ID NO: 495 - protein, 219 aa, Artificial Sequence
  TB001 light chain peptide sequence
DIVLTQSPLSLPVTPGEPASISCRSSKSLLYKDGKTYLNWFLQKPGQSPQLLIYLMSTHASGVPDRFSGSGSGTDFTLKISRVEAEDVGVYYCQQLVDYPLTFGGGTKLEIKRTVAAPSVFIFPPSDEQLKSGTASVVCLLNNFYPREAKVQWKVDNALQSGNSQESVTEQDSKDSTYSLSSTLTLSKADYEKHKVYACEVTHQGLSSPVTKSFNRGEC

SEQ ID NO: 496 - protein, 219 aa, Artificial Sequence
  TB006 light chain peptide sequence
DIVMTQTPLSLSVTPGQPASISCKSSKSLLHSDGITYLYWYLQKPGQSPQLLIYRMSNLASGVPDRFSGSGSGTDFTLKISRVEAEDVGVYYCAQMLEFPLTFGQGTKLEIKRTVAAPSVFIFPPSDEQLKSGTASVVCLLNNFYPREAKVQWKVDNALQSGNSQESVTEQDSKDSTYSLSSTLTLSKADYEKHKVYACEVTHQGLSSPVTKSFNRGEC

SEQ ID NO: 497 - protein, 214 aa, Artificial Sequence
  12G5.D7 light chain peptide sequence
DILMTQSPSSMSVSLGDTVSITCHASQGINSNMGWLQQKPGKSFKGLIYHATNLEDGVPSRFSGSGSGADYSLTISSLESEDFADYYCVQYAQFPPTFGSGTKLEIKRADVAPTVSIFPPSSEQLTSGGASVVCFLNNFYPKDINVKWKIDGSERQNGVLNSWTDQDSKDSTYSMSSTLTLTKDEYERHNSYTCEATHKTSTSPIVKSFNRNEC

SEQ ID NO: 498 - protein, 219 aa, Artificial Sequence
  13A12.2E5 light chain peptide sequence
DVVMTQTPLTLSVAIGQPASISCKSSQSLLYTNGKTYLNWLLQRPGQSPKRLIYLLSKLDSGVPDRFSASGSGTDFTLKISRVEAEDLGVYYCLQSTHFPLTFGAGTKLEMKRADVAPTVSIFPPSSEQLTSGGASVVCFLNNFYPKDINVKWKIDGSERQNGVLNSWTDQDSKDSTYSMSSTLTLTKDEYERHNSYTCEATHKTSTSPIVKSFNRNEC

SEQ ID NO: 499 - protein, 219 aa, Artificial Sequence
  14H10.2C9 light chain peptide sequence
DVVMTQTPLTLSVTIGQPASISCKSSQSLFDSDGKTYLNWLLQRPGQSPKRLIYLVSKLDSGVPDRFTGSGSGTDFTLKISRVEAEDLGVYYCWQGTHFPLTFGAGTKLEMKRADVAPTVSIFPPSSEQLTSGGASVVCFLNNFYPKDINVKWKIDGSERQNGVLNSWTDQDSKDSTYSMSSTLTLTKDEYERHNSYTCEATHKTSTSPIVKSFNRNEC

SEQ ID NO: 500 - protein, 219 aa, Artificial Sequence
  15F10.2D6 light chain peptide sequence
DVLMTQTPLSLPVSLGDQASISCRSSQSIVHNNGNTYLEWYLQKPGQSPKLLIYKVSNRFSGVPDRFSGSGSGTDFTLKISRVEAEDLGVYYCFQGSHVPLTFGGGTKLELKRADVAPTVSIFPPSSEQLTSGGASVVCFLNNFYPKDINVKWKIDGSERQNGVLNSWTDQDSKDSTYSMSSTLTLTKDEYERHNSYTCEATHKTSTSPIVKSFNRNEC

SEQ ID NO: 501 - protein, 214 aa, Artificial Sequence
  19B5.2E6/23H9.2E4 light chain peptide sequence
DIQMTQTTSSLSASLGDRVTISCSASQGINNYLNWYQQKPDGTVKLLIYYASSLHSGVPSRFSGSGSGTDYSLTISNLEPEDIATYYCQQYSQVPYTFGSGTKLEIKRADVAPTVSIFPPSSEQLTSGGASVVCFLNNFYPKDINVKWKIDGSERQNGVLNSWTDQDSKDSTYSMSSTLTLTKDEYERHNSYTCEATHKTSTSPIVKSFNRNEC

SEQ ID NO: 502 - protein, 214 aa, Artificial Sequence
  20D11.2C6 light chain peptide sequence
DIQMNQSPSSLSASLGDTITITCRASQNIYIWLSWYQQKPGNIPKLLIYKASNLHTGVPSRFSGSGSGTDFTLTISTLQPEDIATYFCLQGQSYPLTFGAGTKLEMKRADVAPTVSIFPPSSEQLTSGGASVVCFLNNFYPKDINVKWKIDGSERQNGVLNSWTDQDSKDSTYSMSSTLTLTKDEYERHNSYTCEATHKTSTSPIVKSFNRNEC

SEQ ID NO: 503 - protein, 214 aa, Artificial Sequence
  20H5.A3 light chain peptide sequence
DIQMTQTTSSLSASLGDRVTINCSASQDISNYLNWYQQKPDGTVKLLIYYTSSLLSGVPSRFSGSGSGTDYSLTISNLEPEDIATYFCQQYSKLPYTFGSGTHLEIKRADVAPTVSIFPPSSEQLTSGGASVVCFLNNFYPKDINVKWKIDGSERQNGVLNSWTDQDSKDSTYSMSSTLTLTKDEYERHNSYTCEATHKTSTSPIVKSFNRNEC

SEQ ID NO: 504 - protein, 219 aa, Artificial Sequence
  2D10.2B2 light chain peptide sequence
DIVMTQAAFSNPVTLGTSASISCRSSKSLLHSDGITYLYWYLQRPGQSPQLLIYRMSNLASGVPDRFSGSGSGTDFTLRISRVEAEDVGVYYCAQMIEFPLTFGAGTILELKRADVAPTVSIFPPSSEQLTSGGASVVCFLNNFYPKDINVKWKIDGSERQNGVLNSWTDQDSKDSTYSMSSTLTLTKDEYERHNSYTCEATHKTSTSPIVKSFNRNEC

SEQ ID NO: 505 - protein, 219 aa, Artificial Sequence
  3B11.2G2 light chain peptide sequence
DVVMTQTPLTLSVAIGQPASISCKSSQSLLYTNGKTYLNWLLQRPGQSPKRLIYLVSKLDSGVPDRFSGSGSGTDFTLKISRVEAEDLGVYYCLQSTHFPLTFGAGTKLELKRADVAPTVSIFPPSSEQLTSGGASVVCFLNNFYPKDINVKWKIDGSERQNGVLNSWTDQDSKDSTYSMSSTLTLTKDEYERHNSYTCEATHKTSTSPIVKSFNRNEC

SEQ ID NO: 506 - protein, 219 aa, Artificial Sequence
  7D8.2D8 light chain peptide sequence
DVLMTQTPLSLPVSLGDQASISCRSSQSIVHSNGNTYLEWYLQKPGQSPKLLIYKVSNRFSGVPDRFSGSGSGTDFTLKISRVEAEDLGVYYCFQGSHVPLTFGAGTKLELKRADVAPTVSIFPPSSEQLTSGGASVVCFLNNFYPKDINVKWKIDGSERQNGVLNSWTDQDSKDSTYSMSSTLTLTKDEYERHNSYTCEATHKTSTSPIVKSFNRNEC

SEQ ID NO: 507 - protein, 219 aa, Artificial Sequence
  mTB001 light chain peptide sequence
DIVITQDELSNPVTSGESVSISCRSSKSLLYKDGKTYLNWFLQRPGQSPQLLIYLMSTHASGVSDRFSGSGSGTDFTLEISRVKAEDVGVYYCQQLVDYPLTFGAGTKLELKRADVAPTVSIFPPSSEQLTSGGASVVCFLNNFYPKDINVKWKIDGSERQNGVLNSWTDQDSKDSTYSMSSTLTLTKDEYERHNSYTCEATHKTSTSPIVKSFNRNEC

SEQ ID NO: 508 - protein, 219 aa, Artificial Sequence
  4A11.2B5 light chain peptide sequence
DIVMTQAAFSNPVTLGTSASISCRSSKSLLHSDGITYLYWYLQRPGQSPQLLIYRMSNLASGVPDRFSGSGSGTDFTLRISRVEAEDVGVYYCAQMLEFPLTFGAGTKLELKRTVAAPSVFIFPPSDEQLKSGTASVVCLLNNFYPREAKVQWKVDNALQSGNSQESVTEQDSKDSTYSLSSTLTLSKADYEKHKVYACEVTHQGLSSPVTKSFNRGEC

SEQ ID NO: 509 - protein, 219 aa, Artificial Sequence; identical to SEQ ID NO: 496
  4A11.H1L1 light chain peptide sequence

SEQ ID NO: 510 - protein, 219 aa, Artificial Sequence
  4A11.H4L2 light chain peptide sequence
DIVMTQSPLSLPVTPGEPASISCRSSKSLLHSDGITYLYWYLQKPGQSPQLLIYRMSNLASGVPDRFSGSGSGTDFTLKISRVEAEDVGVYYCAQMLEFPLTFGQGTKLEIKRTVAAPSVFIFPPSDEQLKSGTASVVCLLNNFYPREAKVQWKVDNALQSGNSQESVTEQDSKDSTYSLSSTLTLSKADYEKHKVYACEVTHQGLSSPVTKSFNRGEC

SEQ ID NO: 511 - protein, 219 aa, Artificial Sequence
  4G2.2G6 light chain peptide sequence
DVVMTQTPLTLSVTIGQPASISCKSSQSLLYTDGKTYLSWFLQRPGQSPKRLIYLVSKLDSGVPDRFSGSGSGTDFTLKISRVEAEDLGVYYCLQSTHFPLTFGAGTKLEVKRTVAAPSVFIFPPSDEQLKSGTASVVCLLNNFYPREAKVQWKVDNALQSGNSQESVTEQDSKDSTYSLSSTLTLSKADYEKHKVYACEVTHQGLSSPVTKSFNRGEC

SEQ ID NO: 512 - protein, 214 aa, Artificial Sequence
  6B3.2D3 light chain peptide sequence
SIVMTQTPKFLLVSAGDRVTITCKASQSVSNDVAWYQQKPGQSPKLLIYYASNRYTGVPDRFTGSGYGTDFTFTISTVQAEDLAVYFCQQDYTSPYTFGGGTKLEIKRTVAAPSVFIFPPSDEQLKSGTASVVCLLNNFYPREAKVQWKVDNALQSGNSQESVTEQDSKDSTYSLSSTLTLSKADYEKHKVYACEVTHQGLSSPVTKSFNRGEC

SEQ ID NO: 513 - protein, 214 aa, Artificial Sequence
  6H6.2D6 light chain peptide sequence
DIQMTQTTSSLSASLGDRVTISCSASQGISNYLNWYQQKPDGTVKLLIYYTSSLHSGVPSRFSGSGSGTDYSLTISNLEPEDIATYYCQQYSELPYTFGSGTKLEIKRTVAAPSVFIFPPSDEQLKSGTASVVCLLNNFYPREAKVQWKVDNALQSGNSQESVTEQDSKDSTYSLSSTLTLSKADYEKHKVYACEVTHQGLSSPVTKSFNRGEC

SEQ ID NO: 514 - protein, 214 aa, Artificial Sequence
  9H2.2H10 light chain peptide sequence
DIVMTQSHKFMSTSVGDRVSITCKASQDVSTAVAWYQQKPGQSPKLLIYWASTRHTGVPDRFTGSGSGTDYTLTISSVQAEDLALYYCQQHYTTPLTFGAGTKLELKRTVAAPSVFIFPPSDEQLKSGTASVVCLLNNFYPREAKVQWKVDNALQSGNSQESVTEQDSKDSTYSLSSTLTLSKADYEKHKVYACEVTHQGLSSPVTKSFNRGEC

SEQ ID NO: 515 - protein, 214 aa, Artificial Sequence
  13G4.2F8 light chain peptide sequence
DIVMTQSQKFMSTSVGERVSITCKASQNVGTNVAWYQQKAGQSLELLIYGASNRHTGVPDRFTGSGSGTDFTLTITNVQSEDMTNYFCEQYSNFPLTFGAGTKLELKRTVAAPSVFIFPPSDEQLKSGTASVVCLLNNFYPREAKVQWKVDNALQSGNSQESVTEQDSKDSTYSLSSTLTLSKADYEKHKVYACEVTHQGLSSPVTKSFNRGEC

SEQ ID NO: 516 - protein, 219 aa, Artificial Sequence
  13H12.2F8 light chain peptide sequence
DVVMTQTPLTLSVTIGQPASISCKSSQSLFHSDGKTYLNWLLQRPGQSPKRLIYLVSKLDSGVPDRFTGSGSGTDFTPKISRVEDEDLGVYYCWQGTHFPLTFGAGTKLEMKRTVAAPSVFIFPPSDEQLKSGTASVVCLLNNFYPREAKVQWKVDNALQSGNSQESVTEQDSKDSTYSLSSTLTLSKADYEKHKVYACEVTHQGLSSPVTKSFNRGEC

SEQ ID NO: 517 - protein, 214 aa, Artificial Sequence
  15G7.2A7 light chain peptide sequence
DIQMNQSPSSLSASLGDTISITCRASQNINIWLSWYQQKPGNIPQLLIYKASNLHTGVPSRFSGSGSGTDFTLTISSLQPEDIATYYCLQGQSYPLTFGAGTKLVMKRTVAAPSVFIFPPSDEQLKSGTASVVCLLNNFYPREAKVQWKVDNALQSGNSQESVTEQDSKDSTYSLSSTLTLSKADYEKHKVYACEVTHQGLSSPVTKSFNRGEC

SEQ ID NO: 518 - protein, 217 aa, Artificial Sequence
  19D9.2E5 light chain peptide sequence
DVVMTQTPLTLSVTIGQPASISCKSSQSLLHSDGKTYLNWLLQRPGQPPKRLMYLVSTLDSGVPDRFTGSGSGTDFTLKISRVEAEDLGVYYCWQGTHFPLTFGAGTKPERTVAAPSVFIFPPSDEQLKSGTASVVCLLNNFYPREAKVQWKVDNALQSGNSQESVTEQDSKDSTYSLSSTLTLSKADYEKHKVYACEVTHQGLSSPVTKSFNRGEC

SEQ ID NO: 519 - protein, 217 aa, Artificial Sequence
  23B10.2B12 light chain peptide sequence
DIVMTQAAFSNPVTLGTSASISCRSSKSLLHSDGITYFYWYLQRPGQSPQLLIYRMSNLASGVPDRFSGSGSGTDFTLRISRVEAEDVGVYYCAQMLEFPLTFGAGTKLERTVAAPSVFIFPPSDEQLKSGTASVVCLLNNFYPREAKVQWKVDNALQSGNSQESVTEQDSKDSTYSLSSTLTLSKADYEKHKVYACEVTHQGLSSPVTKSFNRGEC

SEQ ID NO: 520 - protein, 214 aa, Artificial Sequence
  24D12.2H9 light chain peptide sequence
DIVMTQSHKFMSTSVGDRVSITCKASQDVRTAVAWYQQKPGQSPKLLIYWASTRHTGVPDRFTGSGSGTDFTLTLSNVQSEDLADYFCQQYSSYPWTFGGGTKLEIKRTVAAPSVFIFPPSDEQLKSGTASVVCLLNNFYPREAKVQWKVDNALQSGNSQESVTEQDSKDSTYSLSSTLTLSKADYEKHKVYACEVTHQGLSSPVTKSFNRGEC

SEQ ID NO: 521 - protein, 219 aa, Artificial Sequence
  F846C.1B2 light chain peptide sequence
NIWLTQSPSSLAVSAGEMVTMTCKSSQSVLYSSNQKNYLAWYQQKPGQSPKLLIYWASTRESGVPDRFTGSGSGTDFSLTISSVQAEDLAVYYCHQYLSSLTFGAGTKLELKRTVAAPSVFIFPPSDEQLKSGTASVVCLLNNFYPREAKVQWKVDNALQSGNSQESVTEQDSKDSTYSLSSTLTLSKADYEKHKVYACEVTHQGLSSPVTKSFNRGEC

SEQ ID NO: 522 - protein, 219 aa, Artificial Sequence
  F846C.1F5/F846C.2H3 light chain peptide sequence
NIMMTQSPSSLAVSAGEKVTMSCKSSQSVLYSSNQKNYLAWYQQKPGQSPKLLIYWASTRESGVPDRFTGSGSGTDFTLTISSVQPEDLAVYYCHQYLSSLTFGAGTKLELKRTVAAPSVFIFPPSDEQLKSGTASVVCLLNNFYPREAKVQWKVDNALQSGNSQESVTEQDSKDSTYSLSSTLTLSKADYEKHKVYACEVTHQGLSSPVTKSFNRGEC

SEQ ID NO: 523 - protein, 219 aa, Artificial Sequence
  F846C.1H12 light chain peptide sequence
NIMMTQSPSSLAVSAGQKVTMSCKSSQSVLYSSSQKNYLAWYQQKPGQSPKLLIYWASTRESGVPDRFSGSGSGTDFTLTISSVQPEDLAVYYCHQYLSSLTFGAGTKLELKRTVAAPSVFIFPPSDEQLKSGTASVVCLLNNFYPREAKVQWKVDNALQSGNSQESVTEQDSKDSTYSLSSTLTLSKADYEKHKVYACEVTHQGLSSPVTKSFNRGEC

SEQ ID NO: 524 - protein, 219 aa, Artificial Sequence
  F846C.1H5 light chain peptide sequence
DVVMTQTPLSLPVSLGDQASISCRSSQSLVHNSGNTYLHWYLQRPGQSPNLLIYKVSNRFSGVPDRFSGSGSGTDFTLKISRVAAEDLGVYFCSQSTHVPPTFGGGTKLEIKRTVAAPSVFIFPPSDEQLKSGTASVVCLLNNFYPREAKVQWKVDNALQSGNSQESVTEQDSKDSTYSLSSTLTLSKADYEKHKVYACEVTHQGLSSPVTKSFNRGEC

SEQ ID NO: 525 - protein, 216 aa, Artificial Sequence
  F846TC.14A2 light chain peptide sequence
QAVVTQESALTTSPGETVTLTCRSSTGAVTTSNYANWVQEKPDHLFTGLIGGINNRVPGVPARFSGSLIGDKAALTITGAQTEDEAIYFCALWYSNHWVFGGGTKLTVLRTVAAPSVFIFPPSDEQLKSGTASVVCLLNNFYPREAKVQWKVDNALQSGNSQESVTEQDSKDSTYSLSSTLTLSKADYEKHKVYACEVTHQGLSSPVTKSFNRGEC

SEQ ID NO: 526 - protein, 219 aa, Artificial Sequence
  F846TC.14E4 light chain peptide sequence
DIVMTQAAFSNPVTLGTSASISCRSSKSLLHTNGITFLYWYLQKPGQSPQPLIYQMSNLASGVPDRFSSSGSGTDFTLRISRVEAEDVGVYYCAQNLELPWTFGGGTKLEINRTVAAPSVFIFPPSDEQLKSGTASVVCLLNNFYPREAKVQWKVDNALQSGNSQESVTEQDSKDSTYSLSSTLTLSKADYEKHKVYACEVTHQGLSSPVTKSFNRGEC

SEQ ID NO: 527 - protein, 219 aa, Artificial Sequence
  F846TC.16B5 light chain peptide sequence
NIMMTQSPSSLAVSAGEKVTMSCKSSQSVLYSSNQKNYLAWYQQKPGQSPKLLIYWASTRESGVPDRFTGSGSGTDFTLTISSVQAEDLAVYYCHQYLSSLTFGAGTKLELKRTVAAPSVFIFPPSDEQLKSGTASVVCLLNNFYPREAKVQWKVDNALQSGNSQESVTEQDSKDSTYSLSSTLTLSKADYEKHKVYACEVTHQGLSSPVTKSFNRGEC

SEQ ID NO: 528 - protein, 220 aa, Artificial Sequence
  F846TC.7F10 light chain peptide sequence
DIVMTQSPSSLAMSVGQKVTMSCKSSQSLLNSSNQKNYLAWYQQKPGQSPKLLVYFASTRESGVPDRFIGSGSGTDFTLTISSVQAEDLADYFCQQHYSTPYTFGGGAKLEIKRTVAAPSVFIFPPSDEQLKSGTASVVCLLNNFYPREAKVQWKVDNALQSGNSQESVTEQDSKDSTYSLSSTLTLSKADYEKHKVYACEVTHQGLSSPVTKSFNRGEC

SEQ ID NO: 529 - protein, 214 aa, Artificial Sequence
  F847C.10B9 light chain peptide sequence
DIRMTQSPSSLSASLGDTITITCHASQNINVWLSWYQQKPGNIPKLLIYKASNLHTGVPSRFSGSGSGTGFTLTISSLQPEDIATYYCQQGQSYPYTFGGGTKLELKRTVAAPSVFIFPPSDEQLKSGTASVVCLLNNFYPREAKVQWKVDNALQSGNSQESVTEQDSKDSTYSLSSTLTLSKADYEKHKVYACEVTHQGLSSPVTKSFNRGEC

SEQ ID NO: 530 - protein, 214 aa, Artificial Sequence
  F847C.11B1 light chain peptide sequence
EIVLTQSPASLSVTTGEKVTIRCITSIDIDDDMNWYQQKPGEPPKLLISEGNTLRPGVPSRFSSSGYGTDFVFTIENTLSEDVADYYCLQSDNKPLTFGAGTKLELKRTVAAPSVFIFPPSDEQLKSGTASVVCLLNNFYPREAKVQWKVDNALQSGNSQESVTEQDSKDSTYSLSSTLTLSKADYEKHKVYACEVTHQGLSSPVTKSFNRGEC

SEQ ID NO: 531 - protein, 214 aa, Artificial Sequence
  F847C.12F12 light chain peptide sequence
DIQVIQSPSSLSASLGDTITITCHASQNINVWLSWYQQKPGNIPKLLIYKASNLHTGVPSRFSGSGSGTGFTLTISSLQPEDIATYYCQQGQSYPYTFGGGTKLELKRTVAAPSVFIFPPSDEQLKSGTASVVCLLNNFYPREAKVQWKVDNALQSGNSQESVTEQDSKDSTYSLSSTLTLSKADYEKHKVYACEVTHQGLSSPVTKSFNRGEC

SEQ ID NO: 532 - protein, 214 aa, Artificial Sequence
  F847C.26F5 light chain peptide sequence
EIKMNQSPSSLSASLGDTITITCHASQNINVWLSWYQQKPGNIPKLLIYKASNLHTGVPSRFSGSGSGTGFTLTISSLQPEDIATYYCQQGQSYPYTFGGGTKLELKRTVAAPSVFIFPPSDEQLKSGTASVVCLLNNFYPREAKVQWKVDNALQSGNSQESVTEQDSKDSTYSLSSTLTLSKADYEKHKVYACEVTHQGLSSPVTKSFNRGEC

SEQ ID NO: 533 - protein, 216 aa, Artificial Sequence
  F847C.4B10/847.14H4 light chain peptide sequence
QAVVTQESALTTSPGETVTLTCRSSTGAVTTSNYANWVQEKPDHLFTGLIGGTNNRAPGVPARFSGSLIGDKAALTITGAQTEDEAIYFCALWYSNHLVFGGGTKLTVLRTVAAPSVFIFPPSDEQLKSGTASVVCLLNNFYPREAKVQWKVDNALQSGNSQESVTEQDSKDSTYSLSSTLTLSKADYEKHKVYACEVTHQGLSSPVTKSFNRGEC

SEQ ID NO: 534 - protein, 219 aa, Artificial Sequence
  F849C.8D10 light chain peptide sequence
DVLMTQTPLSLPVSLGDQASISCRSSQDIVHSSGNTYLEWYLQKPGQSLKLLIYKVSNRFSGVPDRFSASGSGTDFTLKISRVEAEDLGVYYCFQGSHVPPTFGSGTKLEIKRTVAAPSVFIFPPSDEQLKSGTASVVCLLNNFYPREAKVQWKVDNALQSGNSQESVTEQDSKDSTYSLSSTLTLSKADYEKHKVYACEVTHQGLSSPVTKSFNRGEC

SEQ ID NO: 535 - protein, 219 aa, Artificial Sequence
  F849C.8H3 light chain peptide sequence
DIGMRQAAFSNPVTLGTSASISCRSSKSLLYSNGITYLYWFLQKPGQSPQLLIYQMSNLASGVPDRFSSSGSGTDFTLRISRVEADDVGVYYCAQNLELPWTFGGGTKLEIKRTVAAPSVFIFPPSDEQLKSGTASVVCLLNNFYPREAKVQWKVDNALQSGNSQESVTEQDSKDSTYSLSSTLTLSKADYEKHKVYACEVTHQGLSSPVTKSFNRGEC

SEQ ID NO: 536 - protein, 218 aa, Artificial Sequence
  846.2B11 light chain peptide sequence
DIVLTQSPASLGVSLGQRATISCRASKSVSTSGYSYMHWYQQKPGQPPKLLIYLASILESGVPARFSGSGSGTDFTLNIHPVEEEDAAIYYCQHSRELPLTFGAGTKLELKRTVAAPSVFIFPPSDEQLKSGTASVVCLLNNFYPREAKVQWKVDNALQSGNSQESVTEQDSKDSTYSLSSTLTLSKADYEKHKVYACEVTHQGLSSPVTKSFNRGEC

SEQ ID NO: 537 - protein, 218 aa, Artificial Sequence
  846.4D5 light chain peptide sequence
NIVLTQSPASLAVSLGQRATISCRASESVDSYGNSFMHWYQQKPGQPPKLLIYLASNLESGVPARFSGSGSRTDFTLTIDPVEADDAATYYCQQNNEDPWTFGGGTKLEIKRTVAAPSVFIFPPSDEQLKSGTASVVCLLNNFYPREAKVQWKVDNALQSGNSQESVTEQDSKDSTYSLSSTLTLSKADYEKHKVYACEVTHQGLSSPVTKSFNRGEC

SEQ ID NO: 538 - protein, 219 aa, Artificial Sequence
  846T.1H2 light chain peptide sequence
DVVMTQTPLTLSVTIGQPASISCKSSQSLLYSNGKTYLNWLLQRPGQSPKRLIYLVSKLDSGVPDRFTGSGSGTDFTLKISRVEAEDLGVYYCVQGTHFPQTFGGGTKLEIKRTVAAPSVFIFPPSDEQLKSGTASVVCLLNNFYPREAKVQWKVDNALQSGNSQESVTEQDSKDSTYSLSSTLTLSKADYEKHKVYACEVTHQGLSSPVTKSFNRGEC

SEQ ID NO: 539 - DNA, 348 bp, Artificial Sequence
  TB001 VH DNA sequence
caggtgcagctggtgcagtccggctccgagctgaaaaaacccggcgcctccgtgaaagtgtcctgcaaagcctccggctacacattcacaaactacggcatgaactgggtgaggcaggcccccggccagggcctgaaatggatgggctggatcaacacaaacacaggcgagcccacatacgtggaggagttcacaggcaggttcgtgttctccctggagacatccgtgtccacagcctacctgcagatctcctccctgaaagccgaggacacagccgtgtacttctgcgccccctacgacaacttcttcgcctactggggccagggcacaacagtgacagtgtcctcc

SEQ ID NO: 540 - DNA, 357 bp, Artificial Sequence
  TB006  VH DNA sequence
cagattcaattggttcagagcggctcagaactgaaaaagcctggagccagcgttaaagtgagctgtaaagccagtggatacacattcaccacttacgtcatgtcctgggttagacaggcccctggacaggggctggaatggatgggctggataaacactcactctggagtgcccacatacgccgacgactttacaggcaggttcgtgttttccctagatactagtgtgaatactgcatacttgcaaatctcttctctgaaagcagaggataccgccgtgtacttttgcacccgcgatgggaatgatggggatgccatggacaactggggccaggggacgactgtgacagtgtcttca

SEQ ID NO: 541 - DNA, 366 bp, Artificial Sequence
  12G5.D7 VH DNA sequence
caggtgcagctgaagcagtctggggctgagctggtgaggcctggggcttcagtgaagctgtcctgcaaggcttctggctacactttcactgactactatataaactgggtgaagcagaggcctggacagggacttgagtggattgcaaggatttatcctggaactggtaatactgactacaatgagaagttcaagggcagggccacactgactgcagaaaactcctccagcactgcctacatgcagctcagcagtctgacatctgaggactctgctgtctatttctgtgcaagatttgcgtattactacggtagtggagggtactttgactactggggccacggcaccactctcacagtctcctca

SEQ ID NO: 542 - DNA, 357 bp, Artificial Sequence
  13A12.2E5 VH DNA sequence
cagatccagttggtacagtctggacctgagctgaagaagcctggagagacagtcaagatctcctgcaagacttctgggtataaattcaaaacctatgtgatgagctgggtgaaacaggctccaggaaaggctttaaagtggatgggctggataaacacctactctggagtgccaacatatgctgatgacttcaagggacgatttgccttctctttggaaacctctgccagcactgcctatttggagatcatcaacctcaaaaatgaggacacggctacatatttctgtgcaagagatggtaactacggggatcctatggactactggggtcaaggaacctcagtcaccgtctcctca

SEQ ID NO: 543 - DNA, 351 bp, Artificial Sequence
  14H10.2C9 VH DNA sequence
cagatccagttggtacagtctggacctgagctgaagaagcctggagagacagtcaagatctcctgcaaggcttctgggtataccttcacaacctatggaatgggctgggtgaaacaggctccaggaaaggatttaaagtggatgggctggataaacacctactctggagtgccaacatatgctgatgacttcaagggacggtttgccttctctttggaaacctctgccagcactgcctatttgcagatcagcaacctcaaaaatgaagacacggctacatatttctgttcaaccccttatgaatacgacggggcttactggggccaggggactctggtcactgtctctgca

SEQ ID NO: 544 - DNA, 339 bp, Artificial Sequence
  15F10.2D6 VH DNA sequence
gaagtacagctggtggagtctgggggaggcttagtgaagcctggagggtccctgaaactctcctgtgcagcctctggattcgctttcagttcctatgccatgtcttgggttcgccagactccggaaaagaggctggagtgggtcgcaaccattagtgatggtggtgtttacacctactatacagaccatgtaaagggccgattcaccatctccagagacaatgccgaggacaacctgtacctgcaaatgagccatctgaagtctgaggacacagccatgtattattgtgtgagagatgggggctactggggccaaggcaccactctcacagtctcctca

SEQ ID NO: 545 - DNA, 348 bp, Artificial Sequence
  19B5.2E6 VH DNA sequence
cagatccaacttgttcagagcgggcctgaattgaagaaaccaggcgagactgtaaagatctcctgtaaggccagtggctatacattcaccacctacgcaatgagctgggtcaagcaggcacccggaaagggtctgaagtggatgggttggataaatacatactcaggcgtcccaacctacgctgatgatttgaaggggcgctttgccttttctcttgaaacctcagcatcaaccgcctacttgcagataaataacctcaaaaatgaagacaccgctacctatttctgcgcaagggggccttatgctatggactactggggccagggcacctctgtgactgtaagttct

SEQ ID NO: 546 - DNA, 345 bp, Artificial Sequence
  20D11.2C6 VH DNA sequence
gaggtccagctgcaacaatctggacctgaactggtgaagcctggggcttcagtgaagatatcctgtaaggcttctggatacacgttcactgacttctacataaactgggtgaagcagagccatggaaagagccttgagtggattggagatattaatcctaagaatggtggtattaactacaacccgaagttcaagatcaaggccacattgactgtagacaagtcctccagcacatcctacatggacctccgcggcctgacatctgaggactctgcagtctattactgcacctcaggctacggatttccttactggggccaagggactctggtcactgtctctgca

SEQ ID NO: 547 - DNA, 348 bp, Artificial Sequence
  20H5.A3 VH DNA sequence
cagatccagttggtacagtctggacctgagctgaagaagcctggagagtcagtcaagatctcctgcaaggcttctggttatgccttcacaacctatggaatgagctgggtgcaacaggctccaggaaagggtttaaagtggatgggctgggtaaacacctactctggagtgccaacatgtgctgatgacttcaagggacggtttgccttctctttggaaacctctgccagcactgcctatttgcagatcaacaacctcagaaatgaggacacggctacatatttctgtgcaagagggccctatgctatggactactggggtcaaggaacctcagtcaccgtctcctca

SEQ ID NO: 548 - DNA, 348 bp, Artificial Sequence
  23H9.2E4 VH DNA sequence
cagatccagttggtacagtctggacctgagctgaagaagcctggagagacagtcaagatctcctgcaaggcttctgggtataccttcacaacctatgcaatgagctgggtgaaacaggctccaggaaagggtttaaagtggatgggctggataaacacctactctggagtgccaacatatgctgatgacctcaagggacggtttgccttctctttggaaacctctgccagcactgcctatttgcagatcaacaacctcaaaaatgaggacacggctacatatttctgtgcaagagggccctatgctatggactactggggtcaaggaacctcagtcaccgtctcctca

SEQ ID NO: 549 - DNA, 360 bp, Artificial Sequence
  2D10-VH0-VL0 VH DNA sequence
caagtacagctccagcaatcaggacctgaacttgttaagccaggtgcaagcgtcaaaataagttgtaaagcatcaggttacacctttacagactactatatcaactgggtcaagcaacggcctggtcagggacttgaatggataggttggatctaccctgggtcacaagacaccaagtacaatgaaaaatttaaggggaaagccactctgacagtagatactagctcaagtaccgcctacatgcagctcggcagcctcacttccgaggactctgccgtatatttctgtgccaactacttcgggtcttctgggtggttctttgatgtgtggggaaccggcaccaccgtaaccgtttcctca

SEQ ID NO: 550 - DNA, 357 bp, Artificial Sequence
  3B11.2G2 VH DNA sequence
cagatccagttggtacagtctggacctgagctgaagaagcctggagagacagtcaagatctcctgcaagacttctgggtataaattcaaaacctatgtaatgagctgggtgaaacaggctccaggaaaggctttaaagtggatgggctggataaacacctactctggagtgccaacatatgctgatgacttcaagggacggtttgccttctctttggaaacctctgccagcactgcctatttggagatcatcaacctcaaaaatgaggacacggctacatatttctgtgcaagagatggtaattacggggatcctatggactactggggtcaaggaacctcagtcaccgtctcctca

SEQ ID NO: 551 - DNA, 339 bp, Artificial Sequence
  7D8.2D8 VH DNA sequence
gaagtgcagctggtggagtctgggggaggcttagtgaagcctggagggtccctgaaactctcctgtgcagcctctggattcactttcagtagctatgccatgtcttgggttcgccagactccggaaaagaggctggagtgggtcgcaaccatcagtgatggtggtatttacacctactatccagacaatgtaaagggccgattcaccatttccagagacaatgccaagaacaacctgttcctgcaaatgagccatctgaagtctgaggatacagccatgtattactgtgtaagagatgggggctactggggccaaggcaccactctcacagtctcctca

SEQ ID NO: 552 - DNA, 348 bp, Artificial Sequence
  mIMT001 VH DNA sequence
cagatccaacttgtgcagtcaggtccagaattgaagaagcctggtgagaccgtcaagatttcctgtaaggcctctggttatacttttaccaactatggcatgaattgggtcaagcaggcacctgggaagggtttgaaatggatggggtggataaataccaacacaggggaaccaacttacgttgaagagtttaagggtcgttttgcattcagtcttgagacttctgcaagcacagcttacctccaaattaacaatctcaaaaatgaagatactgctacatatttctgtgctccttatgataattttttcgcctactggggacagggaactctggtcaccgtctcagca

SEQ ID NO: 553 - DNA, 348 bp, Artificial Sequence
  4A11.2B5 VH DNA sequence
caggtacaacttcagcagagcggtccagaacttgtgaagcccggtgctagtgtcaaaatatcttgcaaagcaagtggttattccttcaccaactattacatacactgggtaaaacaacgtccagggcaaggactcgaatggattggttggatctaccccggcagcggcaacactaactacaacgagaagtttaaaggcaaagctactctcacagcagacacttctagcagtacaacaaatatgcagttgtcctctctgacttccgaagacagcgccgtctattactgttctactgcacccggaggttttgacgtctggggttccggcaccacagttaccgttagttcc

SEQ ID NO: 554 - DNA, 348 bp, Artificial Sequence
  4A11.H1L1 VH DNA sequence
caggtgcagctggtgcaatcaggagccgaagttaagaagcctggcgccagcgtcaaggtctcatgtaaagcctccggttacagtttcaccaactactatatgcactgggttaggcaagcaccaggccaggggcttgagtggatgggatggatctatccagggagcggtaacaccaattacaatgagaagtttcaagggcgcgtaaccatgacagcagataccagtataagcaccgcctatatggaactctctcggttgagatccgatgataccgctgtttattactgctctaccgcacctggtggtttcgacgtttggggccaaggtactacagtgaccgtatcatca

SEQ ID NO: 555 - DNA, 348 bp, Artificial Sequence
  4A11.H4L2 VH DNA sequence
caggtgcaactggtccagtctggggccgaggtcaaaaagcctggagcctccgtcaaagtgtcatgtaaagcctcagggtatagtttcaccaactactatatacattgggtcagacaagccccaggccagcgtcttgagtggatgggatggatttatcccggatcagggaatacaaactataacgagaaatttcaaggcagagttactctcactgccgatacctctgcaagtactacctatatggagctctccagtctcagaagcgaagacacagcagtatattactgtagcaccgccccaggcgggtttgacgtgtggggccaaggcactactgtaaccgttagctca

SEQ ID NO: 556 - DNA, 357 bp, Artificial Sequence
  4G2.2G6 VH DNA sequence
caaatacagctcgtgcagtctggtcccgatttgaagaagcctggagaaaccgtaaagataagctgtaaggctagtggttacactttcacaacatacgttatgtcatgggttaaacaggctcctggaaaagaccttaaatggatgggatggattaacacccatagcggtgtcccaacttacgctgacgattttaagggacgatttgacttttctctcgaaacttctgccaacacagcttttttgcagatcaacaatctcaagaatgaagacaccgcaacctatttctgcactcgagatgggaacgacggggatgcaatggataactggggacaaggcacatcagttaccgtgagctct

SEQ ID NO: 557 - DNA, 360 bp, Artificial Sequence
  6B3.2D3 VH DNA sequence
caggtgcagctgaagcagtcaggacctggcctagtgcagccctcacagagcctgtccatcacctgcacagtctctggtttctcattaactagttatggtgtacactgggttcgccagcctccaggaaagggtctggagtggctgggagtgatatggagtggtggaagcacagactataatgctgctttcatatccagactgagcatcagtaaggacaactccaagagccaagttttctttaaaatgaacagtctgcaagctgatgacactgccatatactactgtgccaaagggccttatgattacgacttaggctggtttgcttactggggccaagggactctggtcactgtctctgca

SEQ ID NO: 558 - DNA, 348 bp, Artificial Sequence
  6H6.2D6 VH DNA sequence
cagatccagctggtgcagtccggccccgagctgaagaagcccggcgagactgtgaagatctcctgcaaggcctccggctacaccttcaccacctacggcatgtcctgggtgaagcaggcccccggcaagggcctgaagtggatggcctggatcaacacctactccggcgtgcccacctacgccgacgacttcaagggcaggttcgccttctccctggagacttccgcctccaccgcctacctgcagatcaacaacctgaccaacgaggacaccgccacctacttctgcgccaggggcccctacgccatggactactggggccagggcacctccgtgaccgtgtcctcc

SEQ ID NO: 559 - DNA, 345 bp, Artificial Sequence
  9H2.2H10 VH DNA sequence
caggtccagctgcagcagcctggggctgaactggtggggcctgggtcttcagtgaagctgtcctgcaaggcttctggctacaccttcaccaactactggatacattgggtgaagcagaggcctctacaaggccttgaatggattggtaacattgacccttctgatagtgaaactcactacaatcaaaagttcaaggacaaggccacattgactgtagacaaatcctccagcacagcctacatgcaactcagcagcctgacatctgaggactctgcggtctattactgtgcaagacatggttactacgactactggggccaaggcaccactctcacagtctcctca

SEQ ID NO: 560 - DNA, 357 bp, Artificial Sequence
  13G4.2F8 VH DNA sequence
caggtccagctgcagcagcctggggctgagctggtaaagcctggggcttcagtgaagttgtcctgcaaggcttctggctacactttcaccagctactggatgcactgggtgaagcagaggcctggacaaggccttgagtggattggaatgattcatcctaacagtggtagtactgactacaatgagaagttcaagaacaaggccacactgaatgtagacaaatcctccagtacagcctacatacaactcagcagcctgacatctgaggactctgcggtctattactgtacaagatgggggatttattactacgcgagggactactggggccaaggcaccactctcacagtctcctca

SEQ ID NO: 561 - DNA, 351 bp, Artificial Sequence
  13H12.2F8 VH DNA sequence
cagatccagctggtccaatcaggacccgaactgaaaaaaccaggcgagacagtcaaaatcagctgtaaggcctcaggctacactttcacaacctacgggatgtcatgggtaaagcaagctcctggcaaggggctgaaatggatgggttggatcaacacatactctggagtgcccacctacgctgacgactttaagggtagattcgcatttagcctggaaacaagtgccagtacagcctacctccagataaacaacttgaaaaacgaggataccgcaacctatttttgcgccgtcccctacgagtacgacggtgcctattggggtcagggtacactcgtaacagtttccgcc

SEQ ID NO: 562 - DNA, 345 bp, Artificial Sequence
  15G7.2A7 VH DNA sequence
gaggtccagctgcaacaatctggacctgagctggtgaagcctggggcttcagtgaagatatcctgtaaggcttctggatacacgttcactgactactacatgaactgggtgaagcagagccatggaaagagccttgagtggattggagatattaatcctaacaatggtggtactaactacaaccagaagttcaagggcaaggccacattgactgtagacaagtcctccagcacagcctacatggagctccgcagcctgacatctgaggactctgcagtctattactgcacctcaggctacgggtttccttactggggccaggggactctggtcactgtctctgca

SEQ ID NO: 563 - DNA, 351 bp, Artificial Sequence
  19D9.2E5 VH DNA sequence
cagatccagttggtacagtctggacctgagctgaagaagcctggagagacagtcaagatctcctgcaaggcttctggatataccttcacaacctatggaatgggctgggtgaaacaggctccaggaaagggtttgaagtggatgggctggataaacacctactctggcgtgccaacatatgctgatgacttcaagggacggtttgccttctctttggaaacctctaccagcactgcctatttgcagatcaacaacctcaaaaatgaggacatggctacatatttctgtgcaaccccttatgaatacgacggggcttactggggccaagggactctggtcactgtctctgca

SEQ ID NO: 564 - DNA, 336 bp, Artificial Sequence
  23B10.2B12 VH DNA sequence
caggtccagctgcagcagtctggacctgaactggtgaagcctggggattctgtgaagatatcctgcaaggctgctggctacaccttcagtgactattatataaactgggtgaagcagaggcctggacagggacttgagtggattggatggatttatcctgtaagcgttaatactaagtacaatgagaagttcaagggcaaggccacattgactgtagacacatcctccagcacagcctacatgcagctcagcagcctgacctctgaggactctggggtctatttctgtgcctaccttgattattggggccaagggactctggtcactgtctctgca

SEQ ID NO: 565 - DNA, 360 bp, Artificial Sequence
  24D12.2H9 VH DNA sequence
caggtgcagctgaagcagtcaggacctggcctagtgcagccctcacagagcctgtccatcacctgcacagtctctggtttctcattaactagctatggtgtacactgggttcgccaggctccaggaaagggtctggaatggctgggagtgatatggagtggtggaagcacagactataatgctgctttcatgtccagactgagcatcagcaaggacaactccaagagccaagttttctttaaaatgaacagtctgcaagctgatgacactgccatatactactgtgccaaaagccctgatggttacgacgtcgcctggtttggttactggggccaagggactctggtcactgtctctgca

SEQ ID NO: 566 - DNA, 366 bp, Artificial Sequence
  F846C.1B2 VH DNA sequence
cagatccagttggtgcagtctggacctgagctgaagaagcctggagagacagtcaagatctcctgcaaggcttctgggtataccttcacaaactatggaatgaattgggtgaagcaggctccaggaaagggtttaaagtggatgggctggataaacacctacactggagagccatcatatgctgatgacttcaagggacggtttgccttctctttggaaacctctgccagcactgcctatttgcagatcaacaacctcaaaaatgaggacatggctacatatttctgtgcaagatgggggggttacgctggggattactatgctatggacttctggggtcaaggaacctcagtcaccgtctcctca

SEQ ID NO: 567 - DNA, 366 bp, Artificial Sequence
  F846C.1F5 VH DNA sequence
cagatccagttggtgcagtctggacctgagctgaagaagcctggagagacagtcaagatctcctgcaaggcttctgggtataccttcacaaactatggaatgaactgggtgaagcaggctccaggaaagggtttaaagtggatgggctggataaacacctacactggagagccatcatatgctgatgacttcaagggacggtttgccttctctttggaaacctctgccagcactgcctatttgcagatcaacaacctcaaaaatgaggacatggctacatatttctgtgcaagatgggggggttacgatggggattactatgctatggactactggggtcaaggaacctcagtcaccgtctcctca

SEQ ID NO: 568 - DNA, 366 bp, Artificial Sequence
  F846C.1H12 VH DNA sequence
cagatccagttggtgcagtctggacctgagctgaagaagcctggagagacagtcaagatctcctgcaaggcttctgggtataccttcacaaactttggaatgaactgggtgaagcaggctccaggaaagggtttaaagtggatgggctggataaacacctacactggagagccatcatatgctgatgacttcaagggacggtttgccttctctttggaaacctctgccagcactgcctatttgcagatcaacaacctcaaaaatgaggacattgctacatatttctgtgcaagatgggggggttacgctggggattactatgctatggactactggggtcaaggaacctcagtcaccgtctcctca

SEQ ID NO: 569 - DNA, 348 bp, Artificial Sequence
  F846C.1H5 VH DNA sequence
gaggtccagctgttggagtctgggggaggcttagtgaagcctggagggtccctgaaactctcctgtgcagcctctggattcactttcagcagctatgccatgtcttgggttcgccagactccagagaagaggctggagtgggtcgcatccattagtagtggtggtgacacctactatccagacagtgtgaagggccgattcaccatctctagagataatgccaggaacatcctgtacctgcaaatgagcagtctgaggtctgaggacacggccatgtattactgtgcaagttatggtaactccctctttgactactggggccaaggcaccactctcacagtctcctca

SEQ ID NO: 570 - DNA, 366 bp, Artificial Sequence; identical to SEQ ID NO: 567
  F846C.2H3 VH DNA sequence

SEQ ID NO: 571 - DNA, 342 bp, Artificial Sequence
  F846TC.14A2 VH DNA sequence
cagatccagttggtgcagtctggacctgagctgaagaagcctggagagacagtcaagatctcctgcaaggcttctgggtataccttcacaaactatggaatgaactgggtgaagcaggctccaggaaagggtttaaagtggatgggctggataaacacctacactggagagccaacatatgctggtgacctcaagggacggtttgccttctctttggaaacctctgccagcactgcctatttgcagatcaacaacctcaaaaatgaggacacggctacatatttctgtgtaagatatactatggactactggggtcaaggaacctcagtcaccgtctcctca

SEQ ID NO: 572 - DNA, 372 bp, Artificial Sequence
  F846TC.14E4 VH DNA sequence
caggttactctgaaagagtctggccctgggatattgcagccctcccagaccctcagtctgacttgttctttctctgggttttcactgagcacttctggtatgggtgtaggctggattcgtcagccttcagggaagggtctggagtggctggcacacatttggtgggatgatgataagtactataacacagccctgaagagcgggctcacaatctccaaggatgcctccaaaaaccaggtcttcctcaagatcgccagtatggacactgcagatactgccacatactactgtgctcgaaacctctatgatggttcctacgggtactatgctatggactactggggtcaaggaacctcagtcaccgtctcctca

SEQ ID NO: 573 - DNA, 366 bp, Artificial Sequence
  F846TC.16B5 VH DNA sequence
cagatccagttggtgcagtctggacctgagctgaagaagcctggagagacagtcaagatctcctgcaaggcttctgggtataccttcacaaactatggaatgaactgggtgaagcaggctccaggaaagggtttaaagtggatgggctggataaacacctacactggagagccagcatatgctgatgacttcaagggacggtttgccttctctttggaaacctctgccagcactgcctatttgcagatcaacaacctcaaaaatgaggacatggctacatatttctgtgcaagatgggggggttacgatggggattactatgctatggactactggggtcaaggaacctcagtcaccgtctcctca

SEQ ID NO: 574 - DNA, 369 bp, Artificial Sequence
  F846TC.7F10 VH DNA sequence
gaagtgcagctggtggagtctgggggagacttagtgaagcctggagggtccctgaaactctcctgtgcagcctctggattcactttcagtaactatggcttgtcttggattcgccagactccagacaagaggctggagtgggtcgcaaccattagtagtggtggtagttacacctactatcctgacagtgtgaaggggcgattcaccatctccagagacagtgccaagaacaccctgtacctgcaaatgagcagtctgaagtctgaggacacagccatgtattactgtgcaagacatgcgcattactacggtgttagcccgtactactttgactactggggccaaggcacctgtctcacagtctcctca

SEQ ID NO: 575 - DNA, 357 bp, Artificial Sequence
  F847C.10B9 VH DNA sequence
cagatccagttggtgcagtctggacctgaggtgaagaagcctggagagacagtcaagatctcctgcaaggcttctgggtatatcttcacaaactatggaatgaactgggtgaagcaggctccaggaaagggtttaaagtggatgggctggataaacacctacactggagagccaacatatactgatgacttcaagggacggtttgccttctctttggaaacctctgccagcactgcctatttgcagatcaacaacctcaaaaatgaggacacggctacatatttctgtgcaaagtttggtaactacgtgggagctatggactactggggtcaaggaacctcagtcaccgtctcctca

SEQ ID NO: 576 - DNA, 360 bp, Artificial Sequence
  F847C.11B1 VH DNA sequence
gaggtccagcttcagcagtctggacctgagctggtgaaacctggggcctcagtgaagatatcctgcaaggcttctggaaacacattcactgaccacaacatgcactgggtgaagcagagccatggaaagagccttgagtggattggatatatttatccttacaatggtggtactggctacaaccagaagttcaagagcaaggccacattgactgtagacaattcctccagcacagtctacatggagctccgcagcctgacatctgaggactctgcagtctattactgtgcaagaggggagtatgattacctggcctggtttgcttactggggccaagggactctggtcactgtctctgca

SEQ ID NO: 577 - DNA, 357 bp, Artificial Sequence
  F847C.12F12 VH DNA sequence
cagatccagttggtgcagtctggacctgagctgaagaagcctggagagacagtcaagatctcctgcaaggcttctgggtataccttcacaaactatggaatgaactgggtgaagcaggctccaggaaagggtttaaagtggatgggctggataaacacctacactggagagccaacatatgttgatgacttcaagggacggtttgccttctctttggaaacctctgccagcactgcctatttgcggatcaacaacctcaaaaatgaggacacggctacatatttctgtgcaaagtttggtaactacgtgggagctatggactactggggtcaaggaacctcagtcaccgtctcctca

SEQ ID NO: 578 - DNA, 357 bp, Artificial Sequence; identical to SEQ ID NO: 575
  F847C.26F5 VH DNA sequence

SEQ ID NO: 579 - DNA, 351 bp, Artificial Sequence
  F847C.4B10 VH DNA sequence
gaggtgcagcttgttgagactgggggaggcttagtgaagcctggagggtccctgaaactctcctgtgcagcctctggattcactttcagtagctatgccatgtcttgggttcgccagactccagagaagaggctggagtgggtcgcatccattagtagtggtggtagcacctactatccagacagtgtgaagggccgattcaccatctccagagataatgccaggaacatcctgtacctgcaaatgagcagtctgaggtctgaggacacggccatgtattactgtacaaggtttactacggtagtagagatggactactggggtcaaggaacctcagtcaccgtctcctca

SEQ ID NO: 580 - DNA, 336 bp, Artificial Sequence
  F849C.8D10 VH DNA sequence
caggtccaactgcagcagactggtgctgagcttgtgaagcctggggcctcagtgaagctgtcctgcaaggcttctggctatactttcaccagctactggataaactgggtgaagcagaggcctggacaaggccttgagtggattggaaacatttatcctggtagtagtagtatttactacagtgagaagttcaagagtaaggccacactgactgtagacacatcctccagcacagcctacatgcagctcagcagcctgacatctgacgactctgcggtctattattgtgcaagatggggctactggggccaaggcaccactctcacagtctcctca

SEQ ID NO: 581 - DNA, 363 bp, Artificial Sequence
  F849C.8H3 VH DNA sequence
caggttactctgaaagagtctggccctgggatattgcagccctcccagaccctcagtctgacttgttctttctctgggttttcactgagcacttttggtatgggtgtaggctggattcgtcagccttcagggaagggtctggagtggctggcacacatttggtgggatgatgataaacactataacccagccctgaagagccggctcacaatctccaaggatacctccaaaaaccaggtcttcctcaggatcgccaatgtggacactgcagataatgccacatattactgtgctcgaatcgactatggtgactacgtcgggtttgcttattggggccaagggactctggtcactgtctctgca

SEQ ID NO: 582 - DNA, 354 bp, Artificial Sequence
  846.2B11 VH DNA sequence
caggtccagctacagcagtctggacctgagctggtgaggcctggggctttagtgaagatttcctgcaaggcttctggttacaccttcacaagctacgatataaactgggtgaagcagaggcctggacagggacttgagtggattggatggatttatcctggagatggtagtactaaatataatgagaaattcaagggcaaggccacactgactgcagacaaatcctccagcacagcctacatgcagctcagcagcctgacttctgagaactctgcagtctatttctgtgcaagagaggcggcttctaatgctatggactactggggtcaaggaacctcagtcaccgtctcctca

SEQ ID NO: 583 - DNA, 366 bp, Artificial Sequence
  846.4D5 VH DNA sequence
gaagtgaagcttgaggagtctggaggaggcttggtgcaacctggaggatccatgaaactctcctgtgttgcctctggattcactttcagtaactactggatgaactgggtccgccagtctccagagaaggggcttgagtgggttgctgaaattagattgaaatctaataattatgcaacacattatgcggagtctgtgaaagggaggttcaccatctcaagagatgattccaaaagtagtgtctacctgcaaatgaacaacttaagagctgaagacactggcatttattactgtaccaggcactacggctttccctactggtacttcgatgtctggggcgcagggaccacggtcaccgtctcctca

SEQ ID NO: 584 - DNA, 354 bp, Artificial Sequence
  846T.1H2 VH DNA sequence
cagatccagttggtgcagtctggacctgagctgaagaagcctggagagacagtcaagatctcctgcaaggcttctgggtataccttcacaaactatggaatgaactgggtgaagcaggctccaggaaagggtttaaagtggatgggctggataaacaccaacactggagagccaacatatgctgaagagttcaagggacggtttgccttctctttggaaacctctgccagcactgcctatttgcagatcaacaacctcaaaaatgaggacacggctacatatttctgtgcaaccggggggggtaactgggactttgactactggggccaaggcaccactctcacagtctcctca

SEQ ID NO: 585 - DNA, 342 bp, Artificial Sequence
  847.14H4 VH DNA sequence
cagatccagttggtgcagtctggacctgaactgacgaagcctggagagacagtcaagatctcctgtaaggcttctggctataccttcacagactatggaatgaactgggtgaggcaggctccaggagagactttaaagtggatgggctggataaacacctacactggagagccaacatatgctgatgacttcaaggggcggtttgccttctctttggaatcctctgccagcactgcctatttgcagatcaacaacctcaaaaatgaggacgtggctacatatttctgtgcaagataccctatggactactggggtcaaggaacctcagtcaccgtctcctca

SEQ ID NO: 586 - DNA, 366 bp, Artificial Sequence
  846.2D4 VH DNA sequence
gaagtgaagcttgaggagtctggaggaggcttggtgcaacctggaggatccatgaaactctcctgtgttgcctctggattcactttcagtaactactggatgaactgggtccgccagtctccagagaaggggcttgagtgggttgctgaacttagattgaaatctaataattatgcaacacattatgcggagtctgtgaaagggaggttcaccatctcaagagatgattccaaaagtagtgtctacctgcaaatgaacaacttaagagctgaagacactggcatttattactgtaccaggcactacggctttccctactggtacttcgatgtctggggcgcagggaccacggtcaccgtctcctca

SEQ ID NO: 587 - DNA, 354 bp, Artificial Sequence
  846.2F11 VH DNA sequence
gaggtccagctgcagcagtctggacctgagctggtgaagcctggggcttcagtgaagatgtcctgcaaggcttctggatacacattcactagctatgttatgcactgggtgaagcagaagcctgggcagggccttgagtggattggatatattaatccttacaatgatggtactaagtacaatgagaagttcaaaggcaaggccacactgacttcagacaaatcctccagcacagcctacatggagctcagcagcctgacctctgaggactctgcggtctattactgtgcaagattacttttttactatgctatggactactggggtcaaggaacctcagtcaccgtctcctca

SEQ ID NO: 588 - DNA, 354 bp, Artificial Sequence
  846T.10B1 VH DNA sequence
caggttcagctgcagcagtctggacctgagctggtgaggcctggggctttagtgaagatttcctgcaaggcttctggttacaccttcacaagctacgatataaactgggtgaagcagaggcctggacagggacttgagtggattggatggatttatcctggagatggtagtactaaatacaatgagaaattcaagggcaaggccacactgactgcagacaaatcctccagcacagtttacatgcagctcagcagcctgacttctgagaactctgcagtctatttctgtgctagagaggcggcttctaatgccatggactactggggtcaaggaacctcagtcaccgtctcctca

SEQ ID NO: 589 - DNA, 354 bp, Artificial Sequence
  846T.2E3 VH DNA sequence
caggtccagctgcagcagtctggacctgagctggtgaagcctggggctttagtgaagatatcctgcaaggcttctggttacaccttcacaagctacgatataaactgggtgaagcagaggcctggacagggacttgagtggattggatggatttatcctggagatggtagtactaagtacaatgagaaattcaagggcaaggccgcactgactgcagacaagtcctccagcacagcctacatgcagctcagcagcctgacttctgagaactctgcagtctatttctgtgcaagagaggcggcttctaatgctatggactactggggtcaaggaacctcagtcaccgtctcctca

SEQ ID NO: 590 - DNA, 354 bp, Artificial Sequence
  846T.4C9 VH DNA sequence
gaggtccagctgcagcagtctggacctgagctggtaaagcctggggcttcagtgaagatgtcctgcaaggcttctggatactcattcactaactatattatgcactgggtgaagcagaagcctgggcagggccttgagtggattggatatattaatccttacaatgatggtactaagtacaatgagaagttcaaaggcaaggccacactgacttcagacaaatcctccagcacagcctacatggagctcagcagcctgacctctgaggactctgcggtctattactgtgcaagattacttttttactatgctatggactactggggtcaaggaacctcagtcaccgtctcctca

SEQ ID NO: 591 - DNA, 354 bp, Artificial Sequence
  846T.4E11 VH DNA sequence
caggttcagctgcagcagtctggagctgaactggtaaagcctggggcttcagtgaagttgtcctgcaaggcttctggctacaccttcagaagctatgatataaactgggtgaggcagaggcctgaacagggacttgagtggattggatggatttttcctggagaaggtatttctaagtacaatgagaagttcaagggcaaggccacactgactacagacaaattgtccagcacagcctacatgcagctcagcagcctgacatctgaggactctgctgtctatttctgtgcaagagaggctacggctggggctatggactactggggtcaaggaacctcagtcaccgtctcctca

SEQ ID NO: 592 - DNA, 366 bp, Artificial Sequence
  846T.4F5 VH DNA sequence
gaggtgaagcttctcgagtctggaggaggcttggtgcaacctggaggatccatgaaactctcctgtgttgcctctggattcactttcagtaacttctggatgaactgggtccgccagtctccagagaaggggcttgagtgggttgctgaaattagattgaaatctaataattatgcaacacattatgcggagtctgtgaaagggaggttcaccatctcaagagatgattccaaaagtagtgtctacctgcaaatgaacaacttaagagctgaagacactggcatttattactgtaccaggcactacggctttccctactggtacttcgatgtctggggcgcagggaccacggtcaccgtctcctca

SEQ ID NO: 593 - DNA, 354 bp, Artificial Sequence
  846T.8D1 VH DNA sequence
cagattcagttgcagcagtctggagctgaactggtaaagcctggggcttcagtgaagttgtcctgcaaggcttctggctacaccttcacaagctatgatatatgctgggtgaggcagaggcctgagcagggacttgagtggattggatggatttttcctggagatggtactactaagtacactgagaacttcaagggcaaggccacactgactacagacaaatcctccagcacagcctacatgcacctcagcaggctgacatctgaggactctgctgtctatttctgtgcaagggagggggcgggctcctggtttgcttactggggccaagggactctggtcactgtctctgca

SEQ ID NO: 594 - DNA, 342 bp, Artificial Sequence
  847.10C9 VH DNA sequence
gaggttcagctgcagcagtctggagctgagctggtgcggcctgggacttcagtgaaggtgtcctgcaaggcttcggaatacgccttcaataattacatgatggaatgggtaaaacagaggcctggacagggccttgagtggattggagtgattaatcccggaagtggtgctactaattacaatgagaatttcaaggacaaggcaacactgactgcagacaaatcctccaccactgcctacatgcagctcagcagcctgacatctgatgactctgcggtctatttctgtacctacaatgatcttggttactggggccaagggactctggtcactgtctctgca

SEQ ID NO: 595 - DNA, 369 bp, Artificial Sequence
  847.11D6 VH DNA sequence
gaggtcaagctgcagcagtctggacctgagctgatgaagcctggaacttcaatgaagatatcctgtaaggcttctggttactcattcaccggctacaccatgaactgggtgaagcagagccatggaaagaaccttgagtggattggacttattaatccttacaatggtggtactaactacaaccagaagttcaggggcaaggccacattaagtgtagacaagtcatccaacacagcctacatggagctcctcagtctgacatctgaagactctgcagtctattactgtgcaagaaaggacgattattacggaagtagtccctatgctctggactactggggtcaaggaacctcagtcaccgtctcctca

SEQ ID NO: 596 - DNA, 348 bp, Artificial Sequence
  847.15D12 VH DNA sequence
caggtccagctgcagcagtctggagctgagctgatgaagcctggggcctcagtgaagatatcctgcaaggctactggctacacattcactaactactggatagagtgggtaaagcagaggcctggacatggccttgaatggattggagaatttttacctggagatggcagtagtcactacaatgagaagttcaagggcaaggccacattcacttcagatacatcctccaacacagcctacatacacctcaccagcctgacatctgaggactctgccgtctattactgtgtaagagatgactacgacagtgactactgggcccaaggcaccactctcacagtctcctca

SEQ ID NO: 597 - DNA, 360 bp, Artificial Sequence
  847.15F9 VH DNA sequence
caggtgcagatgaagcagtcaggacctggcctagtgcagccctcacagagcctgtccatcacctgcacagtctctggtttctcattaatcaactatggtgtacactgggttcgccaatctccaggaaagggtctggagtggctgggagtgatatggagtggtggaagcacagactataatgcagctttcatatccagactgagcatcagcaaggacaattccaagagccaagttttctttaaaatgaacagtctgcaagctgatgacacagccatatattactgtgccagaatttattactacggtaggggctatgctatggactactggggtcaaggaacctcagtcaccgtctcctca

SEQ ID NO: 598 - DNA, 366 bp, Artificial Sequence
  847.15H11 VH DNA sequence
gaggtccagcttcagcagtctggggctgaagttgtgaagcctggggctccagtgaagctgtcctgcaaggcttctggctacaccttcaacaactactggctgaactgggtgaaacagcggcctggacgaggcctcgagtggattggaaggattgatccttccgatagtgaaactcactacaatcaaaagttcaaggacaaggccacactgactgtagacatgtcctccagcacagcctacatccaactcagcagcctgacatctgaggactctgcggtctattactgtgcaagaggggattattattacggtactaggggtcctatggactactggggtcaaggcacctcagtcaccgtctcctca

SEQ ID NO: 599 - DNA, 345 bp, Artificial Sequence
  847.20H7 VH DNA sequence
caggtccagctgcagcagtctggggctgagctggtgaggcctggggcttcagtgaacctgtcctgcaaggcttctggctacaccttcaccaactactggatgaactgggtgaagcagaggcctggacaaggccttgaatgggttggtatgattgatccttcagacagtgaaactcactacaatcaaatgttcaaggacaaggccacattgactatagacaaatcttccagcatagcctacatgcagctcagcagcctgacatctgaggactctgcggtctattactgtgcaagatggggtgctatggactactggggtcaaggaacctcagtcaccgtctcctca

SEQ ID NO: 600 - DNA, 363 bp, Artificial Sequence
  847.21B11 VH DNA sequence
caggtgcaactgaagcagtcaggacctggcctggtggcgccctcacagagcctgtccatcacttgcactgtctctggattttcattaaccagctatggtgtacactgggttcgccagcctccaggaaagggtctggagtggctgggaataatatgggctggtggaagcacaaattataatccggctctcatgtccagactgagcatcagcaaagacaaatccaagagccaagttttcttaaaaatgaacagtctgaaaactgatgacacagccatgtactactgtgccagagatcgggcttcattactacggccgggggctatggactactggggtcaaggaacctcagtcaccgtctcctca

SEQ ID NO: 601 - DNA, 354 bp, Artificial Sequence
  847.27B9 VH DNA sequence
cagatccagttggtgcagtctggacctgagctgaagaagcctggagagacagtcaagatctcctgcaaggcttctgggtataccttcacaaactatggaatgaactgggtgaagcaggctccaggaaagggtttaaagtggatgggctggataaacaccaacactggagagccaacatatgctgaagagttcaagggacggtttgccttctctttggagacctctgccagcactgcctatttgcagatcaactacctcaaaaatgaggacacggctacatttttctgtgcaagattggactatgattacgacgaggactactggggccaaggcaccactctcacagtctcctca

SEQ ID NO: 602 - DNA, 360 bp, Artificial Sequence
  847.28D1 VH DNA sequence
caggtgcagcttgtagagaccggacctggcctggtggcgccctcacagagcctgtccatcacttgcactgtctctgggttttcattaaccagctatggtgtacactggattcgtcagtctccaggaaagggtctggagtggctgggaactatatgggctggtggaagcacagattataattcgccactcatgtccagactgagcatcagcaaagacaactccaagaaccaagtttttttaaaaatgaatagtctgcagattgatgacacagccatatattattgtgccagtcctccttctgggtatgattacgacgtgtttgcttcctggggccaagggactctggtcactgtctctgca

SEQ ID NO: 603 - DNA, 360 bp, Artificial Sequence
  847.2B8 VH DNA sequence
caggtacaactgaagcagtcaggacctggcctagtgcagccctcacagagcctgtccatcacctgcacagtctctggtttctcattaatcaactatggtgtacactgggttcgccaatctccaggaaagggtctggagtggctgggagtgatatggagtggtggaagcacagactataatgcagctttcatatccagactgagcatcagcaaggacaattccaagagccaagttttctttaaaatgaacagtctgcaagctgatgacacagccatatattactgtgccagaatttattactacggtaggggctatgctatggactactggggtcaaggaacctcagtcaccgtctcctca

SEQ ID NO: 604 - DNA, 360 bp, Artificial Sequence
  847.3B3 VH DNA sequence
caggtgcagctgaaggagtcaggacctggcctggtggcgccctcacagagcctgtccatcacttgcactgtctctgggttttcattaaccagctatggtgtacactggattcgccagcctccaggaaagggtctggagtggctgggaggaatatgggctggtggaagtacagattacaattcgcctctcatgtcccgactgagtatcactaaagacaactccaagagccaagttttcttaaaaatgaacagtctgcaaagtgatgacacagccatgtactactgtgccagtcctccctctgggtatgattacgacgtgtttgcttactggggccaagggactctggtcactgtctctgca

SEQ ID NO: 605 - DNA, 360 bp, Artificial Sequence
  849.1D2 VH DNA sequence
caggtgcagctgaaggagtcaggacctgtcctggtggcgccctcacagagcctgtccatcacttgcactgtctctgggttttcattaagcagctatggtgtacactgggttcgccagcctccaggaaagggtctggagtggctgggagtaatatgggctggtggaagcacagattatgattcagctctcatgtccagactgagcatcagcaaagacaactccaagagccaagttttcttaaaaatggacagtctgcaaactgatgacacagccatgtactactgtgccaaacccccatatgattacgacggggcctggtttgcttactggggccaagggactctggtcactgtctctgca

SEQ ID NO: 606 - DNA, 342 bp, Artificial Sequence
  849.2D7 VH DNA sequence
caggtgcaactgcagcagtctgggcctcagctggttaggcctggggcttcagtgaagatatcctgcaaggcttctggttactcattcaccaactactggatgcactgggtgaagcagaggcctggacaaggtcttgagtggattggcatgattgatccttccgatagtgaaactaggttaaatcagaagttcaaggacaaggccacattgactgtagacaaatcctccagcacagcctacatgcaactcagcagcccgacatctgaggactctgcggtctattactgtgcaacggggagacccgactactggggccaaggcaccactctcacagtctcctca

SEQ ID NO: 607 - DNA, 342 bp, Artificial Sequence
  849.2F12 VH DNA sequence
caggtgcaactgcagcagtctgggcctcagctggttaggcctggggcttcagtgaagatatcctgcaaggcttctggttactcattcaccagctactggatgcactgggtgaagcagaggcctggacaaggtcttgagtggattggcatgattgatccttccgatagtgaaactaggttaaatcagaagttcaaggacaaggccacattgactgtagacaaatcctccagcacagcctacatgcaactcagcagcccgacatctgaggactctatagtctattactgtgcaaaggggagacccgactactggggccaaggcaccactctcacagtctcctca

SEQ ID NO: 608 - DNA, 354 bp, Artificial Sequence
  849.4B2 VH DNA sequence
gatggaaaacttcaggagtcaggacctggcctcgtgaaaccttctcagtctctgtctctcacctgctctgtcactggctactccatcaccagtggttattactggaactggatccggcagtttccaggaaacaaactggaatggatgggccacataagctacgatggtagaaataactacaacccatctctcaaaaatcgaatctccatcactcgtgacacatctaagaaccagtttttcctgaagttgaattctgtgactactgaggacacagccacatattactgtgcaggctatgatttcctctggtacttcgatgtctggggcacagggaccacggtcaccgtctcctca

SEQ ID NO: 609 - DNA, 363 bp, Artificial Sequence
  849.4F12 VH DNA sequence
caggtgcagctgaaggagtctggccctgggatattgcagccctcccagaccctcagtctgacttgttctttctctgggttttcactgagcacttttggtatgggtgtaggctggattcgtcagccttcagggaagggtctggagtggctggcacacatttggtgggatgatgataaacactataacccagccctgaagagccggctcacaatctccaaggatacctccaaaaaccaggtcttcctcaggatcgccaatgtggacactgcagataatgccacatattactgtgctcgaatcgactatggtgactacgtcgggtttgcttattggggccaagggactctggtcactgtctctgca

SEQ ID NO: 610 - DNA, 354 bp, Artificial Sequence
  849.4F2 VH DNA sequence
gatggacagcttcaggagtcaggacctggcctcgtgaaaccttctcagtctctgtctctcacctgctctgtcactggctactccatcaccagtggttattactggaactggatccggcagtttccaggaaacaaactggaatggatgggccacataagctacgatggtagaaataactacaacccatctctcaaaaatcgaatctccatcactcgtgacacatctaagaaccagtttttcctgaagttgaattctgtgactactgaggacacagccacatattactgtgcaggctatgatttcctctggtacttcgatgtctggggcacagggaccacggtcaccgtctcctca

SEQ ID NO: 611 - DNA, 357 bp, Artificial Sequence
  849.5C2 VH DNA sequence
gaggttcagctgcagcagtctggggcagagcttgtgaagtcaggggcctcagtcaagttgtcctgcacagcttctggcttcaacattaaagactactatatgcactgggtgaagcagaggactgaacagggcctggagtggattggaaggatttatcctgaggatgatgaaactaaatatgccccgaaattccagggcaaggccactataacagcagacacatcctccaacacagcctacctgcagctcagcagcctgacatctgaggacactgccgtctattactgtgctagatcagggggttactacgtttggtttgcttactggggccaagggactctggtcactgtctctgca

SEQ ID NO: 612 - DNA, 363 bp, Artificial Sequence
  849.8D12 VH DNA sequence
gaggtccagctacaacagtctggacctgagctggtgaagcctgggtcttcagtgaagatatcctgcaaggcttctagatacacattcactgactacaacatggactgggtgaagcagagccatggaaagagacttgagtggattggatatatttatcctaacaatggtggtactggctacaaccagaagttcaagggcaaggccacattgactgtagacaagtcctccagcacagcctacatggagctccgcagcctgacatctgaggactctgcagtctattactgtgcaaggtcctactacgatggtagctacgatgctatggactactggggtcaaggaacctcagtcaccgtctcctca

SEQ ID NO: 613 - DNA, 342 bp, Artificial Sequence
  F847C.21H6 VH DNA sequence
cagatccagttggtgcagtctggacctgagctgaagaagcctggagagacagtcaagatctcctgcaaggcttctgggtataccttcacaatctttggaatgaactgggtgaagcaggctccaggaaagggtttaaagtggatgggctgggtaaacacctacactggagagccaacatatgctgatgacttcaagggacggtttgccttctctttggaaacctctgccagcactgcctatttgcagatcaacaacctcaaaaatgaggacacggctacatatttctgtgcaagaggctggtttgcttactggggccaagggactctggtcactgtctctgca

SEQ ID NO: 614 - DNA, 360 bp, Artificial Sequence
  849.5H1 VH DNA sequence
caggtgcagctgaaggagtcaggacctgtcctggtggcgccctcacagagcctgtccatcacttgcactgtctctgggttttcattaaccagttatggtatacactgggttcgccagcctccaggaaagggtctggagtggctgggagtaatatgggctggtggaagcacaaattataattcagctctcatgtccagactgagcatcagcaaagacaactccaagagccaagttttcttaaaaatgaacagtctgcaaattgatgacacagccatgtactattgtgccaaacccccccatgattacgaccaggcctggtttgcttactggggccaagggactctgatcactgtctctgca

SEQ ID NO: 615 - DNA, 348 bp, Artificial Sequence
  847.23F11 VH DNA sequence
caggtccagctgcagcagtctggggctgagctggtgaggcctggggcttcagtgaagctgtcctgcaaggcttctggctacaccttcaccagctcctggatgaactgggtgaaacagaggcctggacaaggccttgactggattggtatgattgatccttcagacagtgaaactcactacaatcaaatgttcaaggacaaggccacattgactgtagacaaatcctctaacacagcctacatgcagctcagcaggctgacatctgaggactcagcggtctattactgtgtaaatagtaactacgagagtggctattggggccaaggcaccactctcacagtctcctca

SEQ ID NO: 616 - DNA, 348 bp, Artificial Sequence
  847.16D10 VH DNA sequence
caggtccagctgcagcagtctggggctgagctggtgaggcctggggcttcagtgaagctgtcctgcaaggcttctggctacaccttcaccggctactggttgaactgggtgaagcagaggcctggacaaggcctggaatggattggtatgattgatccttcagacagtgaaactcactacaatcaagtgttcaaggacaaggccacaatgactgtagacaggtcctccagcacagcctacatgcagctcagcggactgacatctgaggactctgcggtctattactgtgcaaatagtaactacgcgagtggctcctggggccagggcaccactctcacagtctcctca

SEQ ID NO: 617 - DNA, 360 bp, Artificial Sequence
  847.13E2-mH0mL1 VH DNA sequence
gaggtccagcttcagcagtctggacctgagctggtgaagcctggggcttcagtgaaggtttcctgcaaggcttctggttactcattcactgactacaacatgtactgggtgatgcagagccatggaaagagccttgagtggattggatatattgatccttacaatgatgctactagctacagccagaagttcacgggcaaggccacattgactgttgacaagtcctccagcacagccttcatgcatctcaacagcctgacatctgaggactctgcagtctattactgtgcaagatgggggaggtacgaatactatgctatggactattggggtcaaggaacctcagtcaccgtctcctca

SEQ ID NO: 618 - DNA, 360 bp, Artificial Sequence; identical to SEQ ID NO: 617
  847.13E2-mH0mL2 VH DNA sequence

SEQ ID NO: 619 - DNA, 345 bp, Artificial Sequence
  847.12C4 VH DNA sequence
caggtacagctgaaggagtcaggacctgaccttgtgcagccctcacagaccctgtctctcacctgcactgtctctgggttctcattaaccatctatggtgttcactgggttcgccagcctccaggaaagggactggagtgggtgggaacagtggcctgggatgacaaaaaatattataattcacctctacaatctcgactgagcatcagcagggatacctccaagaaccaagttttcttaaaactgagcagtctgcaaactgaagacacagccatgtactactgtactatgactgggggccctataaactactggggtccaggaacctcagtcaccgtctcctca

SEQ ID NO: 620 - DNA, 351 bp, Artificial Sequence
  847.4D3 VH DNA sequence
gaggtgcagctggtggagtctgggggaggcttagtgaagcctggagggtccctgaaactctcctgtgcagcctctggattcactttcagtagctatgccatgtcttgggttcgccagactccagagaagaggctggagtgggtcgcatccattagtagtggtgatagcccctactatccagacagtgtgaagggccgcttcaccatctccagagataatgccaggaacatcctgtacctgcaaatgagcagtctgaggtctgaggacacggccatgtattactgtacaaggtttactacggtagtagagatggactactggggtcaaggaacctcagtcaccgtctcctca

SEQ ID NO: 621 - DNA, 336 bp, Artificial Sequence
  TB001 VL DNA sequence
gacatcgtgctgacccagtctccactgagcctgcctgttacacctggcgagccagcctccatctcctgcagatcctctaagtccctgctgtacaaggacggcaagacctacctgaactggttcctgcagaagcccggccagtctcctcagctcctgatctacctgatgagcacccatgcctctggcgtgcccgatagattttccggctctggctctggcaccgacttcaccctgaagatctccagagtggaagccgaggacgtgggcgtgtactactgtcagcagctggtggactaccctctgacctttggcggcggaacaaagctggaaatcaag

SEQ ID NO: 622 - DNA, 336 bp, Artificial Sequence
  TB006 VL DNA sequence
gatatagtgatgacccaaacacctttgtccctgtcagtcaccccaggccaacccgcatctatctcatgcaaatcctcaaaaagtcttttgcactctgacgggataacatatctctactggtatcttcaaaaacctggtcagtccccccagctcttgatctatagaatgagtaaccttgcctctggtgtccccgaccggtttagtggaagcgggtctgggaccgacttcaccctcaagattagtcgcgtcgaagccgaagatgtgggagtgtattactgtgcccagatgctcgaatttcccctgacatttggtcaaggaactaaattggagattaag

SEQ ID NO: 623 - DNA, 321 bp, Artificial Sequence
  12G5.D7 VL DNA sequence
gacatcctgatgacccaatctccatcctccatgtctgtatctctgggagacacagtcagcatcacttgccatgcaagtcagggcattaactctaatatggggtggttgcagcagaaaccagggaaatcatttaagggcctgatctatcatgcaaccaacttggaagatggagttccatcaaggttcagtggcagtggatctggagcagattattctctcaccatcagcagcctggaatctgaagattttgcagactattactgtgtacagtatgctcagtttcctcctacgttcggatcggggaccaagctggaaataaaa

SEQ ID NO: 624 - DNA, 336 bp, Artificial Sequence
  13A12.2E5 VL DNA sequence
gatgttgtgatgacccagactccactcactttgtcggttgccattggacaaccagcttccatctcttgcaagtcgagtcagagcctcttatatactaatggaaaaacctatttgaattggttattacagaggccaggccagtctccaaaacgcctaatctatctgctgtctaaattggactctggagtccctgacaggttcagtgccagtggatcagggacagatttcacactgaaaatcagcagagtggaggctgaggatttgggagtttattactgcttgcagagtacacattttccgctcacgttcggtgctgggaccaagctggagatgaaa

SEQ ID NO: 625 - DNA, 336 bp, Artificial Sequence
  14H10.2C9 VL DNA sequence
gatgttgtgatgacccagactccactcactttgtcggttaccattggacaaccagcctccatctcttgcaagtcaagtcagagcctcttcgatagtgatggaaagacatatttgaattggttgttacagaggccaggccagtctccaaagcgcctaatctatctggtgtctaaactggactctggagtccctgacaggttcactggcagtggatcagggacagatttcacactgaaaatcagcagagtggaggctgaggatttgggagtttattattgctggcaaggtacacattttcctctcacgttcggtgctgggaccaagctggaaatgaaa

SEQ ID NO: 626 - DNA, 336 bp, Artificial Sequence
  15F10.2D6 VL DNA sequence
gatgttttgatgacccaaactccactctccctgcctgtcagtcttggagatcaagcctccatctcttgcagatctagtcagagcattgtacataataatggaaacacctatttagaatggtacctgcagaaaccaggccagtctccaaaactcctgatctacaaagtttccaaccgattttctggggtcccagacaggttcagtggcagtggatcagggacagatttcacactcaagatcagcagagtggaggctgaggatctgggagtttattactgctttcaaggttcacatgttccgctcacgttcggtggtgggaccaagttggagctgaaa

SEQ ID NO: 627 - DNA, 321 bp, Artificial Sequence
  19B5.2E6 VL DNA sequence
gatatacaaatgactcaaactacctcttctctttccgcatctttgggtgatcgggtcactatatcctgctccgcctctcaaggcataaacaattacctgaattggtatcagcaaaaaccagacggaactgtaaaattgcttatctactacgcttcaagtctgcatagtggggttcccagcagattttccggttccgggtccggcactgattattctctcacaattagtaacctggaacctgaggacattgcaacttattactgtcaacaatacagtcaggtaccttacactttcggatcaggaacaaagttggaaatcaag

SEQ ID NO: 628 - DNA, 321 bp, Artificial Sequence
  20D11.2C6 VL DNA sequence
gacatccagatgaaccagtctccatccagtctgtctgcatccctcggagacacaattaccatcacttgccgtgccagtcagaacatttatatttggttaagttggtaccagcagaaaccaggaaatattcctaaactcttgatctataaggcttccaacttgcacacaggcgtcccatcaaggtttagtggcagtggatctggaacagatttcacattaaccatcagcactctgcagcctgaagacattgccacttacttctgtctccagggtcaaagttatcctctcacgttcggtgctgggaccaagctggagatgaaa

SEQ ID NO: 629 - DNA, 321 bp, Artificial Sequence
  20H5.A3 VL DNA sequence
gatatccagatgacacagactacatcctccctgtctgcctctctgggagacagagtcaccatcaattgcagtgcaagtcaggacattagcaattatttaaactggtatcagcagaaaccagatggaactgttaaactcctgatctattacacatcaagtttactctcaggagtcccatcaaggttcagtggcagtgggtctgggacagattattctctcaccatcagcaacctggaacctgaagatattgccacttacttttgtcagcaatatagtaagcttccctatacgttcggatcggggacccacctggaaataaaa

SEQ ID NO: 630 - DNA, 321 bp, Artificial Sequence
  23H9.2E4 VL DNA sequence
gatatccagatgacacagactacatcctccctgtctgcctctctgggagacagagtcaccatcagttgcagtgcaagtcagggcattaacaattatttaaactggtatcagcagaaaccagatggaactgttaaactcctgatctattacgcatcaagtttacactcaggagtcccatcaaggttcagtggcagtgggtctgggacagattattctctcaccatcagcaacctggaacctgaagatattgccacttactattgtcagcagtatagtcaggttccgtatacgttcggatcggggaccaagttggaaataaaa

SEQ ID NO: 631 - DNA, 336 bp, Artificial Sequence
  2D10-VH0-VL0 VL DNA sequence
gacatagtaatgacacaggccgcatttagcaatccagtaaccttgggcacatccgcctccatatcttgcaggtcatccaaaagcttgctgcactctgacggtattacttacctgtactggtatttgcagcgacctgggcaatcccctcaactcctgatttaccgcatgagcaacctggcctcaggggtgcctgaccgcttttcaggatcagggagcggcactgacttcaccttgcgaatcagcagagtagaagcagaggatgttggagtttactactgtgcccagatgatcgaatttccacttacttttggggccgggaccattctggagcttaaa

SEQ ID NO: 632 - DNA, 336 bp, Artificial Sequence
  3B11.2G2 VL DNA sequence
gatgttgtgatgacccagactccactcactttgtcggttgccattggacaaccagcttccatctcttgcaagtcgagtcagagcctcttatatactaatggaaaaacctatttgaattggttattacagaggccaggccagtctccaaaacgcctaatctatctggtgtctaaattggactctggagtccctgacaggttcagtggcagtggatcagggacagatttcacactgaaaatcagcagagtggaggctgaggatttgggagtttattactgcttgcagagtacacattttccgctcacgttcggtgctgggaccaagctggagctgaaa

SEQ ID NO: 633 - DNA, 336 bp, Artificial Sequence
  7D8.2D8 VL DNA sequence
gatgttttgatgacccaaactccactctccctgcctgtcagtcttggagatcaagcctccatctcttgcagatctagtcagagcattgtacatagtaatggaaacacctatttagaatggtacctgcagaaaccaggccagtctccaaagctcctgatctacaaagtttccaaccgattttctggggtcccagacaggttcagtggcagtggatcagggacagatttcacactcaagatcagcagagtggaggctgaggatctgggagtttattactgctttcaaggttcacatgttccgctcacgttcggtgctgggaccaagctggagctgaaa

SEQ ID NO: 634 - DNA, 336 bp, Artificial Sequence
  mIMT001 VL DNA sequence
gatattgttattactcaggatgagcttagtaatcctgtcactagcggggaaagtgttagtatcagttgtcgttcatccaagtcactcctctacaaagacggcaagacttatctcaactggtttcttcaacgacccggtcaatctccacagctcctgatttacctgatgtcaactcacgcttctggtgttagcgaccgtttctccggaagtggctccgggacagacttcactcttgaaatctcacgtgtaaaagcagaggacgtaggtgtctattattgtcaacagcttgtggactaccccttgacctttggcgctggcacaaagctggaactgaag

SEQ ID NO: 635 - DNA, 336 bp, Artificial Sequence
  4A11.2B5 VL DNA sequence
gacattgtgatgactcaggcagccttttccaaccctgtaacacttggaactagtgcctccatctcatgccgttccagcaagagtcttttgcacagcgatgggataacctatctctattggtatctgcaacgacccggtcagtcaccccaacttcttatctatcgaatgtctaacttggcctccggcgtgcccgaccgcttttccgggagtgggagcggtacagatttcaccttgcgaatttcccgggttgaggcagaggacgtaggtgtctactattgtgctcagatgcttgagtttcctctcactttcggagccggcaccaaactggaactgaaa

SEQ ID NO: 636 - DNA, 336 bp, Artificial Sequence; identical to SEQ ID NO: 622
  4A11.H1L1 VL DNA sequence

SEQ ID NO: 637 - DNA, 336 bp, Artificial Sequence
  4A11.H4L2 VL DNA sequence
gatattgtaatgacccaaagccccctgtccttgcctgttaccccaggtgagcctgccagcatatcttgccgatccagtaaatctctgcttcatagcgatggcatcacctatttgtattggtatttgcagaagcccggccagagcccccagttgctgatctacagaatgtccaaccttgctagtggagtgcccgaccggtttagcggttcaggctcagggactgatttcactcttaaaatcagtagggtagaggccgaagacgttggtgtatattattgtgctcagatgttggagtttccactcacatttggacaaggtacaaagctggaaattaag

SEQ ID NO: 638 - DNA, 336 bp, Artificial Sequence
  4G2.2G6 VL DNA sequence
gatgtcgtaatgactcaaacccccctgacccttagtgttactataggccagcccgcaagcatctcctgcaaatcctcccagtctcttctttatactgatggcaaaacctacttgtcctggtttttgcagcgcccaggtcaaagtcctaaacgtcttatttacttggtctctaaactcgattccggcgtgcctgaccggttctccggtagcggtagcggtaccgatttcactttgaagattagccgagttgaggcagaagacctcggggtctactactgccttcagagtacacacttcccacttacatttggcgcaggaaccaagttggaggttaaa

SEQ ID NO: 639 - DNA, 321 bp, Artificial Sequence
  6B3.2D3 VL DNA sequence
agtattgtgatgacccagactcccaaattcctgcttgtatcagcaggagacagggttaccataacctgcaaggccagtcagagtgtgagtaatgatgtagcttggtaccaacagaagccagggcagtctcctaaattgttgatatattatgcatccaatcgctacactggagtccctgatcgcttcactggcagtggatatgggacggatttcactttcaccatcagcactgtgcaggctgaagacctggcagtttatttctgtcagcaggattatacctctccgtacacgttcggaggggggaccaagctggaaataaaa

SEQ ID NO: 640 - DNA, 321 bp, Artificial Sequence
  6H6.2D6 VL DNA sequence
gacatccagatgacccagaccacctcctccctgtccgcctccctgggcgacagggtgaccatctcctgctccgcctcccagggcatctccaactacctgaactggtaccagcagaagcccgacggcaccgtgaagctgctgatctactacacctcctccctgcactccggcgtgccctccaggttctccggctccggctccggcaccgactactccctgaccatctccaacctggagcccgaggacatcgccacctactactgccagcagtactccgagctgccctacaccttcggctccggcaccaagctggagatcaag

SEQ ID NO: 641 - DNA, 321 bp, Artificial Sequence
  9H2.2H10 VL DNA sequence
gacattgtgatgacccagtctcacaaattcatgtccacatcagtaggagacagggtcagcatcacctgcaaggccagtcaggatgtgagtactgctgtagcctggtatcaacaaaaaccagggcaatctcctaaactactgatttactgggcatccacccggcacactggagtccctgatcgcttcacaggcagtggatctgggacagattatactctcaccatcagcagtgtgcaggctgaagacctggcactttattactgtcagcaacattataccactccgctcacgttcggtgctgggaccaagctggagctgaaa

SEQ ID NO: 642 - DNA, 321 bp, Artificial Sequence
  13G4.2F8 VL DNA sequence
gacattgtgatgacccagtctcaaaaattcatgtccacatcagtaggagagagggtcagcatcacctgcaaggccagtcagaatgtaggtactaatgtagcctggtatcagcagaaagcagggcagtctcttgaactgctgatctatggggcatccaaccggcacactggagtccctgatcgcttcacaggcagtggatctgggacagatttcactctcaccatcaccaatgtgcagtctgaagacatgacaaattatttctgtgagcaatatagcaactttcctctcacgttcggtgctgggaccaagctggagctgaaa

SEQ ID NO: 643 - DNA, 336 bp, Artificial Sequence
  13H12.2F8 VL DNA sequence
gacgttgttatgacacaaacaccacttacactttctgtaactatcggtcagcctgcctcaatttcatgtaagtcttctcagtccctgtttcatagcgacgggaagacttacctgaattggcttctccaacgaccaggccaatcacccaagcgccttatttatttggtcagtaaattggacagtggagttcccgatagatttaccgggagcggttctgggaccgatttcaccccaaagatctccagggtagaagacgaagatctcggtgtgtactattgctggcaggggacacatttccctctgacattcggtgctggaaccaaacttgagatgaaa

SEQ ID NO: 644 - DNA, 321 bp, Artificial Sequence
  15G7.2A7 VL DNA sequence
gacatccagatgaaccagtctccatccagtctgtctgcatccctcggagacacaatttccatcacttgccgtgccagtcagaacattaatatttggttaagctggtaccagcagaaaccaggaaatattcctcaactattgatctataaggcttccaacttgcacacaggcgtcccctcaaggtttagtggcagtggatctggaacagatttcacattaaccatcagcagtctgcagcctgaagacattgccacttactactgtctacagggtcaaagttatcctctcacgttcggtgctgggaccaagctggtgatgaaa

SEQ ID NO: 645 - DNA, 330 bp, Artificial Sequence
  19D9.2E5 VL DNA sequence
gatgttgtgatgacccagactccactcactttgtcggttaccattggacaaccagcctccatctcttgtaagtcaagtcagagcctcttacatagtgatggaaagacatatttgaattggttgttacagaggccaggccagcctccaaagcgcctaatgtatctggtgtctacactggactctggagtccctgacaggttcactggcagtggatcagggacagatttcacactgaaaatcagcagagtggaggctgaggatttgggagtttattattgctggcaaggtacacattttcctctcacgttcggtgctgggaccaagccggag

SEQ ID NO: 646 - DNA, 330 bp, Artificial Sequence
  23B10.2B12 VL DNA sequence
gatattgtgatgacgcaggctgcattctccaatccagtcactcttggaacgtcagcttccatctcctgcaggtctagtaagagtctcctacatagtgatggcatcacttatttctattggtatctgcagaggccaggccagtctcctcagctcctgatatatcggatgtccaaccttgcctcaggagtcccagacaggttcagtggcagtgggtcaggaactgatttcacactgagaatcagcagagtggaggctgaggatgtgggtgtttattactgtgctcaaatgctagaattcccgctcacgttcggtgctgggaccaagctggag

SEQ ID NO: 647 - DNA, 321 bp, Artificial Sequence
  24D12.2H9 VL DNA sequence
gacattgtgatgacccagtctcacaaattcatgtccacatcagtaggagacagggtcagcatcacctgcaaggccagtcaggatgtgcgtactgctgtagcctggtatcaacagaaaccagggcaatctcctaaactactgatttactgggcatccacccggcacactggagtccctgatcgcttcacaggcagtggatctgggacagatttcactctcacccttagcaatgtgcagtctgaagacttggcagattatttctgtcagcaatatagtagttatccgtggacgttcggtggaggcaccaagctggaaatcaaa

SEQ ID NO: 648 - DNA, 336 bp, Artificial Sequence
  F846C.1B2 VL DNA sequence
aacatttggttgacacagtcgccatcatctctggctgtgtctgcaggagaaatggtcactatgacctgtaagtccagtcaaagtgttttatacagttcaaatcagaagaactacttggcctggtaccagcagaaaccagggcagtctcctaaactgctgatctactgggcatccactagggaatctggtgtccctgatcgcttcacaggcagtggatctgggacagacttttctcttaccatcagcagtgtacaagctgaagacctggcagtttattactgtcatcaatatctctcctcgctcacgttcggtgctgggaccaagctggagctgaaa

SEQ ID NO: 649 - DNA, 336 bp, Artificial Sequence
  F846C.1F5 VL DNA sequence
aacattatgatgacacagtcgccatcatctctggctgtgtctgcaggagaaaaggtcactatgagctgtaagtccagtcaaagtgttttatacagttcaaatcagaagaactacttggcctggtaccagcagaaaccagggcagtctcctaaactgctgatctactgggcatccactagggaatctggtgtccctgatcgcttcacaggcagtggatctgggacagattttactcttaccatcagcagtgtacaacctgaagacctggcagtttattactgtcatcaatacctctcctcgctcacgttcggtgctgggaccaagctggagctgaaa

SEQ ID NO: 650 - DNA, 336 bp, Artificial Sequence
  F846C.1H12 VL DNA sequence
aacattatgatgacacagtcgccatcatctctggctgtgtctgcaggacaaaaggtcactatgagctgtaagtccagtcaaagtgttttatacagttcaagtcagaagaactacttggcctggtaccagcagaaaccagggcagtctcctaaacttctgatctactgggcatccactagggaatctggtgtccctgatcgcttctcaggcagtggatctgggacagattttactcttaccatcagcagtgtacaacctgaagacctggcagtttattactgtcatcaatacctctcctcgctcacgttcggtgctgggaccaagctggagctgaaa

SEQ ID NO: 651 - DNA, 336 bp, Artificial Sequence
  F846C.1H5 VL DNA sequence
gatgttgtgatgacccaaactccactctccctgcctgtcagtcttggagatcaagcctccatctcttgcagatctagtcagagccttgtacacaatagtggaaacacctatttacattggtacctgcagaggccaggccagtctccaaacctcctgatctacaaagtttccaaccgattttctggggtcccagacaggttcagtggcagtggatcagggacagatttcacactcaagatcagcagagtggcggctgaggatctgggagtttatttctgctctcaaagtacacatgttcctccgacgttcggtggaggcaccaagctggaaatcaaa

SEQ ID NO: 652 - DNA, 336 bp, Artificial Sequence; identical to SEQ ID NO: 649
  F846C.2H3 VL DNA sequence

SEQ ID NO: 653 - DNA, 327 bp, Artificial Sequence
  F846TC.14A2 VL DNA sequence
caggctgttgtgactcaggaatctgcactcaccacatcacctggtgaaacagtcacactcacttgtcgctcaagtactggggctgttacaactagtaactatgccaactgggtccaagaaaaaccagatcatttattcactggtctaataggtggtatcaataaccgagttccaggtgttcctgccagattctcaggctccctgattggagacaaggcagccctcaccatcacaggggcacagactgaggatgaggcaatatatttctgtgctctatggtatagcaaccattgggtgttcggtggaggaaccaaactgactgtccta

SEQ ID NO: 654 - DNA, 336 bp, Artificial Sequence
  F846TC.14E4 VL DNA sequence
gatattgtgatgacgcaggctgcattctccaatccagtcactcttggaacatcagcttccatctcctgcaggtctagtaagagtctcctacatactaatggcatcacttttttgtattggtatctgcagaagccaggccagtctcctcagcccctgatttatcagatgtccaaccttgcctcaggagtcccagacaggttcagtagcagtgggtcaggaactgatttcacactgagaatcagcagagtggaggctgaggatgtgggtgtttattactgtgctcaaaatctagaacttccttggacgttcggtggaggcaccaagctggaaatcaat

SEQ ID NO: 655 - DNA, 336 bp, Artificial Sequence
  F846TC.16B5 VL DNA sequence
aacattatgatgacacagtcgccatcatctctggctgtgtctgcaggagaaaaggtcactatgagctgtaagtccagtcaaagtgttttatacagttcaaatcagaagaactacttggcctggtaccagcagaaaccagggcagtctcctaaactactgatctactgggcatccactagggaatctggtgtccctgatcgcttcacaggcagtggatctgggacagattttactcttaccatcagcagtgtacaagctgaagacctggcagtttattactgtcatcaatacctctcctcgctcacgttcggtgctgggaccaagctggagctgaaa

SEQ ID NO: 656 - DNA, 339 bp, Artificial Sequence
  F846TC.7F10 VL DNA sequence
gacattgtgatgacacagtctccatcctccctggctatgtcagtaggacagaaggtcactatgagctgcaagtccagtcagagccttttaaatagtagcaatcaaaagaactatttggcctggtaccagcagaaaccaggacagtctcctaaacttctggtatactttgcatccactagggaatctggggtccctgatcgcttcataggcagtggatctgggacagatttcactcttaccatcagcagtgtgcaggctgaagacctggcagattacttctgtcagcaacattatagcactccgtacacgttcggagggggggccaagctggaaataaaa

SEQ ID NO: 657 - DNA, 321 bp, Artificial Sequence
  F847C.10B9 VL DNA sequence
gacatccggatgactcagtctccatccagtctgtctgcatcccttggagacacaattaccatcacttgccatgccagtcagaacattaatgtttggttaagctggtaccagcagaaaccaggaaatattcctaaactattgatctataaggcttccaacttgcacacaggcgtcccatcaaggtttagtggcagtggatctggaacaggtttcacattaaccatcagcagcctgcagcctgaagacattgccacttactactgtcaacagggtcaaagttatccgtacacgttcggaggggggaccaagctggagctgaaa

SEQ ID NO: 658 - DNA, 321 bp, Artificial Sequence
  F847C.11B1 VL DNA sequence
gaaattgtgttgacccagtctccagcatccctgtccgtgactacaggagaaaaagtcactatcagatgcataaccagcattgatattgatgatgatatgaactggtaccagcagaagccaggggaacctcctaagctccttatttcagaaggcaatactcttcgtcctggagtcccatcccgattctccagcagtggctatggcacagattttgtttttacaattgaaaacacgctctcagaagatgttgcagattactactgtttgcaaagtgataacaagcctctcacgttcggtgctgggaccaagctggagctgaaa

SEQ ID NO: 659 - DNA, 321 bp, Artificial Sequence
  F847C.12F12 VL DNA sequence
gacatccaggtgattcagtctccatccagtctgtctgcatcccttggagacacaattaccatcacttgccatgccagtcagaacattaatgtttggttaagctggtaccagcagaaaccaggaaatattcctaaactattgatctataaggcttccaacttgcacacaggcgtcccatcaaggtttagtggcagtggatctggaacaggtttcacattaaccatcagcagcctgcagcctgaagacattgccacttactactgtcaacagggtcaaagttatccgtacacgttcggaggggggaccaagctggagctgaaa

SEQ ID NO: 660 - DNA, 321 bp, Artificial Sequence
  F847C.26F5 VL DNA sequence
gaaattaagatgaaccagtctccatccagtctgtctgcatcccttggagacacaattaccatcacttgccatgccagtcagaacattaatgtttggttaagctggtaccagcagaaaccaggaaatattcctaaactattgatctataaggcttccaacttgcacacaggcgtcccatcaaggtttagtggcagtggatctggaacaggtttcacattaaccatcagcagcctacagcctgaagacattgccacttactactgtcaacagggtcaaagttatccgtacacgttcggaggggggaccaagctggagctgaaa

SEQ ID NO: 661 - DNA, 327 bp, Artificial Sequence
  F847C.4B10 VL DNA sequence
caggctgttgtgactcaggaatctgcactcaccacatcacctggtgaaacagtcacactcacttgtcgctcaagtactggggctgttacaactagtaactatgccaactgggtccaagaaaaaccagatcatttattcactggtctaataggtggtaccaacaaccgagctccaggtgttcctgccagattctcaggctccctgattggagacaaggctgccctcaccatcacaggggcacagactgaggatgaggcaatatatttctgtgctctatggtacagcaaccatttagtgttcggtggaggaaccaaactgactgtccta

SEQ ID NO: 662 - DNA, 336 bp, Artificial Sequence
  F849C.8D10 VL DNA sequence
gatgttttgatgacccaaactccactctccctgcctgtcagtcttggagatcaagcctccatctcttgcagatctagtcaggacattgtgcatagtagtggaaacacctatttagaatggtacctgcagaaaccaggccagtctctaaagctcctgatttacaaagtttccaaccgattttctggggtcccagacaggttcagtgccagtggatcagggacagatttcacactcaagatcagcagagtggaggctgaggatctgggagtttattactgctttcaaggttcacatgttcctcccacgttcggctcggggacaaagttggaaataaaa

SEQ ID NO: 663 - DNA, 336 bp, Artificial Sequence
  F849C.8H3 VL DNA sequence
gatattgggatgaggcaggctgcattctccaatccagtcactcttggaacatcagcttccatctcctgcaggtctagtaagagtctcctatatagtaatggcatcacttatttgtattggtttctccagaagccaggccagtctcctcagctcctgatttatcagatgtccaaccttgcctcaggagtcccagacaggttcagtagcagtgggtcaggaactgatttcacactgagaatcagcagagtggaggctgacgatgtgggtgtttattactgtgctcaaaatctagaacttccgtggacgttcggtggaggcaccaagctggaaatcaaa

SEQ ID NO: 664 - DNA, 333 bp, Artificial Sequence
  846.2B11 VL DNA sequence
gacattgtgctgacacagtctcctgcttccttaggtgtttctctggggcagagggccaccatctcatgcagggccagcaaaagtgtcagtacatctggctatagttatatgcactggtaccaacagaaaccaggacagccacccaaactcctcatctatcttgcatccatcctagaatctggggtccctgccaggttcagtggcagtgggtctgggacagacttcaccctcaacatccatcctgtggaggaggaggatgctgcaatctattactgtcagcacagtagggagcttcctctcacgttcggtgctgggaccaagctggagctgaaa

SEQ ID NO: 665 - DNA, 333 bp, Artificial Sequence
  846.4D5 VL DNA sequence
aacattgtgctgacccaatctccagcttctttggctgtgtctctagggcagagggccaccatatcctgcagagccagtgaaagtgttgatagttatggcaatagttttatgcactggtaccagcagaaaccaggacagccacccaaactcctcatctatcttgcatccaacctagaatctggggtccctgccaggttcagtggcagtgggtctaggacagacttcaccctcaccattgatcctgtggaggctgatgatgctgcaacctattactgtcagcaaaataatgaggatccgtggacgttcggtggaggcaccaagctggaaatcaaa

SEQ ID NO: 666 - DNA, 336 bp, Artificial Sequence
  846T.1H2 VL DNA sequence
gatgttgtgatgacccagactccactcactttgtcggttaccattggacaaccagcctctatctcttgcaagtcaagtcagagtctcttatatagtaatggaaaaacctatttgaattggttattacagaggccaggccagtctccaaagcgcctaatctatctggtgtctaaactggactctggagtccctgacaggttcactggcagtggatcaggaacagattttacactgaaaatcagcagagtggaggctgaggatttgggagtttattactgcgtgcaaggtacacattttcctcagacgttcggtggaggcaccaagctggaaataaaa

SEQ ID NO: 667 - DNA, 327 bp, Artificial Sequence; identical to SEQ ID NO: 661
  847.14H4 VL DNA sequence

SEQ ID NO: 668 - DNA, 333 bp, Artificial Sequence
  846.2D4 VL DNA sequence
aacattgtgctcacccaatctccagcttctttggctgtgtctctagggcagagggccaccatatcctgcagagccagtgaaagtgttgatagttatggcaatagttttatgcactggtaccagcagaaaccaggacagccacccaaactcctcatctatcttgcatccaacctagaatctggggtccctgccaggttcagtggcagtgggtctaggacagacttcaccctcaccattgatcctgtggaggctgatgatgctgcaacctattactgtcagcaaaataatgaggatccgtggacgttcggtggaggcaccaagctggaaataaaa

SEQ ID NO: 669 - DNA, 321 bp, Artificial Sequence
  846.2F11 VL DNA sequence
gacatcctgatgacccaatctccatcctccatgtctgtatctctgggagacacagtcagcatcacttgccatgcaagtcagggcattaacagtaatatagggtggttgcagcagaaaccagggaagtcatttaagggcctgatctatcatggaaccaacttggaagatggagttccatcaaggttcagtggcagtggatctggagcagattattctctcaccatcagcagcctggaatctgaagattttgcggactattactgtgtacagtatgatcagtttccgtggacgttcggtggaggcaccaagctggaaatcaaa

SEQ ID NO: 670 - DNA, 333 bp, Artificial Sequence
  846T.10B1 VL DNA sequence
gacattgtgatgtcacagtctcctgcttccttaggtgtttctctggggcagagggccaccatctcatgcagggccagcaaaagtgtcagtacatctggctatagttatatgcactggtaccaacagaaaccaggacagccacccaaactcctcatctatcttgcatccatcctagaatctggggtccctgccaggttcagtggcagtgggtctgggacagacttcaccctcaacatccatcctgtggaggaggaggatgctgcaatctattactgtcagcacagtagggagcttcctctcacgttcggtgctgggaccaagctggagctgaaa

SEQ ID NO: 671 - DNA, 333 bp, Artificial Sequence
  846T.2E3 VL DNA sequence
gacattgtgctgacacagtctcctgcttccttagctgtatctctggggcagagggccaccatctcatgcagggccagcaaaagtgtcagtacatctggctatagttatatgcactggtaccaacagaaaccaggacagccacccaaactcctcatctatcttgcatccatcctagaatctggggtccctgccaggttcagtggcagtgggtctgggacagacttcaccctcaacatccatcctgtggaggaggaggatgctgcaacctattactgtcagcacagtagggagcttcctctcacgttcggtgctgggaccaagctggagctgaaa

SEQ ID NO: 672 - DNA, 321 bp, Artificial Sequence
  846T.4C9 VL DNA sequence
gacattttgatgacccaaactccatcctccatgtctgtatctctgggagacacagtcagcatcacttgccatgcaagtcagggcattagcagtaatatagggtggttgcagcagaaaccacggaaatcatttaagggcctgatctattatggaaccaacttggaagatggagttccatcaaggttcagtggcagtggatctggagcagattattctctcaccatcagcagcctggaatctgaagattttgcagactattactgtgtacagtatgatcagtttccgtggacgttcggtggaggcaccaagctggaaataaaa

SEQ ID NO: 673 - DNA, 333 bp, Artificial Sequence
  846T.4E11 VL DNA sequence
gacattgtgctgacacagtctcctgcttccttagctgtatctctggggcagagggccaccatctcatgcagggccagcaaaagtgtcagtacatctggctatagttgtatgcactggtaccaacagaaaccaggacagccacccaaactcctcatctatcttgcatccaacctagaatctggggtccctgccaggttcagtggcggtgggtctgggacagacttcaccctcagcatccatcctgtggaggaggaggatgctgcaacctattactgtcaccacagtacggagcttccgtacacgttcggaggggggaccaagctggaagtagaa

SEQ ID NO: 674 - DNA, 333 bp, Artificial Sequence
  846T.4F5 VL DNA sequence
gacattgtgctgacccaatctccagcttctttggctgtgtctctagggcagagggccaccatatcctgcagagccagtgaaagtgttgatagttatggcaatagttttatgcactggtaccagcagaaaccaggacagccacccaaactcctcatctatcttgcatccaacctagaatctggggtccctgccaggttcagtggcagtgggtctaggacagacttcaccctcaccattgatcctgtggaggctgatgatgctgcaacctattactgtcagcaaaataatgaggatccgtggacgttcggtggaggcaccaagctggaaatcaaa

SEQ ID NO: 675 - DNA, 324 bp, Artificial Sequence
  846T.8D1 VL DNA sequence
gacattgtgctgacacagtctcctgcttccttagctgtatctctggggcagagggccaccatctcatgcagggccagcaaaagtgtcagtacatctggctatagttatatgcactggtaccaacagaaaccaggacagccacccaaactcctcatctatcttgcatccatcctagaatctggggtccctgccaggttcagtggcagtgggtctgggacagacttcaccctcaacatccatcctgtggaggaggaggatgctgcaacctattactgtcagcacagtagggagcttcctctcacgttcggtgctgggaccaagctg

SEQ ID NO: 676 - DNA, 333 bp, Artificial Sequence
  847.10C9 VL DNA sequence
gatgttgtgatgacccagactccactcactttgtcggttaccattggacaaccagcctctatctcttgcaagtcaagtcagagcctcttatatagtgatggaaaaacctatttgaattggttattacagaggccaggccagtctccaaagcgcctaatctatctggtgtctcaactggactctggagtccctgacaggttcactggcagtggatcaggaacagattttacactgaaaatcagcagagtggaggctgatgatttgggagtttattgctgcgtgcaaggtacacatcttcccacgttcggaggggggaccaagctggaaataaaa

SEQ ID NO: 677 - DNA, 333 bp, Artificial Sequence
  847.11D6 VL DNA sequence
gacattgtgatgacacagtctcccgcttctttggctgtgtctctagggcagagggccaccatatcctgcagagccagtgaaagtgttgaaaatcatgtcaatagttttatgcactggttccaacagaaaccaggacagccacccaaactcctcatctatcgtgcatccaacctacaatctgggatccctgccaggttcagtggcagtgggtctaggacagacttcaccctcaccattaatcctgtggaggctgatgatgttgcaacctattactgtcagcaaaataatgaggtcccgtacacgttcggaggggggaccaagctggaaataaaa

SEQ ID NO: 678 - DNA, 327 bp, Artificial Sequence
  847.15D12 VL DNA sequence
caggctgttgtgactcaggaatctgcactcaccacatcacctggtgaaacagtcacactcacttgtcgctcaagtactggggctgttacaactagtaactatgccaactgggtccaagaaaaaccagatcatttattcactggtctaataggtggtaccaacaaccgagctccaggtgttcctgccagattctcaggctccctgattggagacaaggctgccctcaccatcacaggggcacagactgaggatgaggcaatatatttctgtgctctatggtacagcaaccatttggtgttcggtggaggaaccaaactgactgtccta

SEQ ID NO: 679 - DNA, 318 bp, Artificial Sequence
  847.15F9 VL DNA sequence
caaattgttctctcccagtctccagcaatcctgtctgcatctccaggggagaaggtcacaatgacttgcagggccagctcaagtgtaacttacatgtactggtaccagcagaagccaggatcctccccccaaccctggatttatgccacatccaacctggcttctggagtccctgctcgcttcagtggcagtgggtctgggacctcttactctctcacaatcagcagagtggaggctgaagatgctgccacttattactgccagcagtggagtagtaacccactcacgttcggtgctgggaccaagctggagctgaaa

SEQ ID NO: 680 - DNA, 333 bp, Artificial Sequence
  847.15H11 VL DNA sequence
gacattgtgctaacacagtctccagcttctttggctgtgtctctagggcagagggccaccatctcctgcagagccagcgaaagtcttgataattctggcattagttttatgaactggttccaacagagaccaggacagccacccaaactcctcatctatgctgcatccaacctagaatccggggtccctgccaggtttagtggcagtgggtctgggacagacttcagcctcaacatccatcctatggaggaggatgatgctgcaatgtatttctgtcagcacagtaaggaggttccgtggacgttcggtggaggcaccaagctggaaatcaaa

SEQ ID NO: 681 - DNA, 321 bp, Artificial Sequence
  847.20H7 VL DNA sequence
gacattgtgatgacccagtctcacaaaatcatgtccacatcagtaggagacagggtcagcatcacctgcaaggccagtcaggatgtgagtaccactgtggcctggtttcagcaaaaaccaggacaatctcctaaactactgctttactgggcatccacccggcacactggagtccctgatcgcttcacaggcagtggatctgggacagattatactctcaccatcagcagtgtccaggctgaagacctggcactttattactgtcagcaacattatagccctccattcacgttcggctcggggaccaagctggaaataaaa

SEQ ID NO: 682 - DNA, 321 bp, Artificial Sequence
  847.21B11 VL DNA sequence
gacattgtgatgactcagtctcaaaaattcatgtccacatcagtaggagacagggtcagcgtcacctgcaaggccagtcagaatgtgggtattaatgtagcctggtatcaacagaaaccagggcaatctcctaaagcactgatttactcggcatcctaccggtacagtggagtccctgatcgcttcacaggcagtggatctgggacagatttcactctcaccatcagcaatgtgcagtctgaagacttggcagagtatttctgtcagcaatataatagttatccgtacacgttcggaggggggaccaagctggaaatgaaa

SEQ ID NO: 683 - DNA, 336 bp, Artificial Sequence
  847.27B9 VL DNA sequence
gacgttgtgatgacccagactccactcactttgtcggttacccttggacaacccgcctccatctcttgcaggtcaagtcagagcctcttagatagtgatggaaagacatatttgaattggttgttacagaggccaggccagtctccaaagcgcctaatctatttggtgtctagactggactctggagtccctgacaggttcactggcagtggatcagggacagatttcacactgaaaatcagcagagtggaggctgaggatctgggagtttattattgctggcaaggtacacattttccgttcacgttcggaggggggaccaagctggaaataaaa

SEQ ID NO: 684 - DNA, 321 bp, Artificial Sequence
  847.28D1 VL DNA sequence
gacatccggatgactcagtctccagcctccctatctgcatctgtgggagaaactgtcaccatcacatgtcgagcaagtgggaatattcacaattatttagcatggtatcatcagaaacagggaaaatctcctcagctcctggtctataatgtaaaaaccttagcagatggtgtgccatcaaggttcagtggcagtggatcaggaacacaattttctctcaagatcaacagtttgcagcctgaagattttgggacttattattgtcaacatttttggagtatttttccgacgttcggtggaggcaccaagctggaaataaaa

SEQ ID NO: 685 - DNA, 318 bp, Artificial Sequence
  847.2B8 VL DNA sequence
caaattcttctctcccagtctccagcaatcctgtctgcatctccaggggagaaggtcacaatgacttgcagggccagctcaagtgtaacttacatgtactggtaccagcagaagccaggatcctccccccaaccctggatttatgccacatccaacctggcttctggagtccctgctcgcttcagtggcagtgggtctgggacctcttactctctcacaatcagcagagtggaggctgaagatgctgccacttattactgccagcagtggagtagtaacccactcacgttcggtgctgggaccaagctggagctgaaa

SEQ ID NO: 686 - DNA, 315 bp, Artificial Sequence
  847.3B3 VL DNA sequence
gacattttgatgactcagtctccagcctccctatctgcatctgtgggagaaactgtcaccatcacatgtcgagcaagtgggaatattcacaattatttagcatggtatcagcagaaacagggaaaatctcctcaactcctggtctatagtgcaaaaaccttagcagatggtgtgccatcaaggttcagtggcagtggatcaggaacacaattttctctcaagatcgacagcctgcagcctgaagattttgggacttattactgtcaacatttttggagtctttttccgacgttcggtggaggcaccaagctggaa

SEQ ID NO: 687 - DNA, 321 bp, Artificial Sequence
  849.1D2 VL DNA sequence
gacgttgtgatgacccagactcccaaattcctgcttgtatcagcaggagacagggttaccataacctgcaaggccagtcaaagtgtgagtagtgatgtagcttggtaccaacagaagccagggcagtctcctaaactgctgatatactttgcatccaatcgctacactggagtccctgatcgcttcactggcagtggatatgggacggatttcactttcaccatcagcactgtccaggctgaagacctggcagtttatttctgtcagcataattatatctctccgttcacgttcggaggggggaccaagctggaaataaaa

SEQ ID NO: 688 - DNA, 321 bp, Artificial Sequence
  849.2D7 VL DNA sequence
gacattgtgatgacccagtctcacaaattcatgtccacatcagtaggagacagggtcagcatcacctgcaaggccagtcaggatgtgagtactgctgtagcctggtatcaacaaaaaccagggcaatctcctaaactactgatttactgggcatccacccggcacactggagtccctgatcgcttcacaggcagtggatctgggacagattatactctcaccatcagcagtgtgcaggctgaagacctggcactttattactgtcagcaacattatagcactccgtacacgttcggaggggggaccaagctggaaataaaa

SEQ ID NO: 689 - DNA, 321 bp, Artificial Sequence
  849.2F12 VL DNA sequence
gacattgcgatgacccagtctcacaaattcatgtccacatcagtaggagacagggtcagcatcacctgcaaggccagtcaggatgtgagtactgctgtagcctggtatcaacaaaaaccagggcaatctcctaaactactgatttactgggcatccacccggcacactggagtccctgatcgcttcacaggcagtggatctgggacagattatactctcaccatcagcagtgtgcaggctgaagacctggcactttattactgtcagcaacattataacactccgtacacgttcggaggggggaccaagctggaaataaaa

SEQ ID NO: 690 - DNA, 336 bp, Artificial Sequence
  849.4B2 VL DNA sequence
gatgtggggatgacccagactccactcattttgtcggttaccattggacaaccagcttccatctcttgcaagtcaagtcagagcctcttatatattaatggaaaaacctatttgaattggttattacagaggccaggccagtctccaaaacgcctaatctatctggtgtctaaattggactctggagtccctaacagattcagtggcagtggatcagggacagatttcacactgaaaatcagcagagtggaggctgaggatttgggagtttattactgcttgcagagtacacattttcctcagacgttcggtggaggcaccaagctggaaatcaaa

SEQ ID NO: 691 - DNA, 321 bp, Artificial Sequence
  849.4F12 VL DNA sequence
gacatcctgctgacccagtctccatcctccatgtctgtatctctgggagacacagtcagcatcacttgccatgcaagtcagggcattaacagtaatatagggtggttgcagcagaaaccagggaagtcatttaagggcctgatctatcatggaaccaacttggaagatggagttccatcaaggttcagtggcagtggatctggagcagattattctctcaccatcagcagcctggaatctgaagattttgcggactattactgtgtacagtatgatcagtttccgtggacgttcggtggaggcaccaagctggaaatcaaa

SEQ ID NO: 692 - DNA, 336 bp, Artificial Sequence
  849.4F2 VL DNA sequence
gatgttgggatgacccagactccactcattttgtcggttaccattggacaaccagcttccatctcttgcaagtcaagtcagagcctcttatatattaatggaaaaacctatttgaattggttattacagaggccaggccagtctccaaaacgcctaatctatctggtgtctaaattggactctggagtccctaacagattcagtggcagtggatcagggacagatttcacactgaaaatcagcagagtggaggctgaggatttgggagtttattactgcttgcagagtacacattttcctcagacgttcggtggaggcaccaagctggaaatcaaa

SEQ ID NO: 693 - DNA, 336 bp, Artificial Sequence
  849.5C2 VL DNA sequence
gatattgtgatgactcaggctgcaccctctgtacctgtcactcctggagagtcagtatccatctcctgcaggtctagtaggagtctcctgcatagtaatggctacacttacttgtattggttcctgcagaggccaggccagtctcctcggctcctgatatatcggatgtccaaccttgcctcaggagtcccagacaggttcagtggcagtgggtcaggaactgctttcacactgagaatcagtagagtggaggctgaggatgtgggtgtttattactgtatgcaacatctagaatatccgtacacgttcggaggggggaccaagctggaaataaaa

SEQ ID NO: 694 - DNA, 318 bp, Artificial Sequence
  849.8D12 VL DNA sequence
gacatccagatgacacagactacatcctccctgtctgcctctctgggagacagagtcaccatcagttgcagtgcaagtcagggcattagcaattatttaaactggtatcagcagaaaccagatggaactgttaaactcctgatctattacacatcaagtttacactcaggagtcccatcaaggttcagtggcagtgggtctgggacagattattctctcaccatcagcaacctggaacctgaagatattgccacttactattgtcagcagtatagtaagcttcctcggacgttcggtggaggcaccaagctggaaatc

SEQ ID NO: 695 - DNA, 336 bp, Artificial Sequence
  F847C.21H6 VL DNA sequence
gatgttgtgatgacccagactccactcactttgtcggttaccattggacaaccagcctccatctcttgcaagtcaagtcggagcctcttagatagtgatggaaagacatatttgaattggttgttacagaggccaggccagtctccaaagcgcctaatctatctggtgtccaaactggactctggagtccctgacaggttcactggcagtggatcagggacagatttcacactgaaaatcagcagagtggaggctgaggatttgggagtttattattgctggcaaggtacacattttcctcagacgttcggtggaggcaccaagctggaaatcaat

SEQ ID NO: 696 - DNA, 321 bp, Artificial Sequence
  849.5H1 VL DNA sequence
gacatccagatgaaccagtctccatccagtctgtctgcatcccttggagacacaattaccatcacttgccatgccagtcagaacattaatgtttggttaagctggtaccagcagaaaccaggaaatattcctaaactattgatctatcaggcttccaacttacacacaggcgtcccatcaaggtttagtggccgtggatctggaacaggtttcacattaaccatcagcagcctgcagcctgaagacattgccacttactactgtcaacagggtcaaagttctccattcacgttcggctcggggacaaagttggaaataaaa

SEQ ID NO: 697 - DNA, 321 bp, Artificial Sequence
  847.23F11 VL DNA sequence
gacattttgatgacccagtctcacaaattcatgtccacatcagtaggagacagggtcagcatcacctgcaaggccagtcaggatgtgagttctgttgtagtctggtatcaacaaaaaccaggacaatctcctaaacaactaatttactgggcatccacccggcacactggagtccctgatcgcttcacaggcagtggatctgggacagattatactctcaccatcagcagtgtgcaggctgaagacctggcactttattactgtcagcaacattatagcacgccgtacacgttcggaggggggaccaagctggaaataaaa

SEQ ID NO: 698 - DNA, 327 bp, Artificial Sequence
  847.16D10 VL DNA sequence
caggctgttgtgactcaggaatctgcactcaccacatcacctggtgaaacagtcacactcacttgtcgctcaagtactggggctgttacaactagtaactatgccaactgggaccaagaaaaaccagatcatttattcactggtctaataggtggtaccaacaaccgagctccaggtgttcctgccagattctcaggctccctgattggagacaaggctgccctcaccatcacaggggcacagactgaggatgaggcaatatatttctgtgctctatggtacagcaaccatttggtgttcggtggaggaaccaaggtcactgtccta

SEQ ID NO: 699 - DNA, 333 bp, Artificial Sequence
  847.13E2-mH0mL1 VL DNA sequence
gacattgtgatgacacagtctcctgcttccttacctgtatctctggggcagagggccaccatctcatgcagggccagcaaaagtgtcactacatctgcctatagttatatacactggtaccaacagagaccaggacagccacccaaactcctcatctatcttgcatccaacctagaatctggggtccctgccaggttcagtggcagtgggtctgggacagacttcaccctcaacatccatcctgtggaggaggaggatgctgcaacctattactgtcagcacaatagggagcttcctccgacgttcggtggaggcaccaagctggaaatcaat

SEQ ID NO: 700 - DNA, 321 bp, Artificial Sequence
  847.13E2-mH0mL2 VL DNA sequence
gatattgtgctaactcagtctccagccaccctgtctgtgactccaggagatagcgtcagtttttcctgcagggccagccaaattattaacaacaacctacactggtatcaacaaaaatcacatgagtctcctaggcttctcatcaggtatacttcccagtccatctctgggatcccctccaggttcagtggcagtggatcagggacagatttcactctcagtatcaacaatgtggagactgaagattttggaatgtatttctgtcaacagactaacagctggcctctcacgttcggtgctgggaccaagctggagctgaaa

SEQ ID NO: 701 - DNA, 333 bp, Artificial Sequence
  847.12C4 VL DNA sequence
gatgttgtgatgacccagactccactcactttgtcggttaccattgaacaaacagcctccatctcttgcaagtcaagtcagagcctcttagatcgtgatggaaagacatatttgaattggttgttacagaggccaggccagtctccaaagcgcctaatctatctggtgtctaaactggactctggagtccctgacaggttcactggcagtggatcagggacagatttcacactgaaaatcagcagagtggaggctgaggatttgggagtttattattgctggcaaggtacacattttccgacgttcggtggaggcaccaagctggaaatcaaa

SEQ ID NO: 702 - DNA, 321 bp, Artificial Sequence
  847.4D3 VL DNA sequence
gatgttgtgatgacccaaactcccaaattcctgcctataacagcagaagacagggttaccattacctgcaaggccagtcagagtgtgagtaatgaagtagcttggtaccaacagaagccagggcagtctcctaaactgctgatatactatgcatccaatcgctacactggagtccctgatcgcttcactggcagtggatctggcacggatttcactttcaccatcagaagtgtgcaacttgaagacctggcagtttatttctgtcagcagcattatagctctccgtggacgttcggtggaggcaccaagctggaaatcaaa

SEQ ID NO: 703 - DNA, 1332 bp, Artificial Sequence
  TB001 heavy chain DNA sequence
caggtgcagctggtgcagtccggctccgagctgaaaaaacccggcgcctccgtgaaagtgtcctgcaaagcctccggctacacattcacaaactacggcatgaactgggtgaggcaggcccccggccagggcctgaaatggatgggctggatcaacacaaacacaggcgagcccacatacgtggaggagttcacaggcaggttcgtgttctccctggagacatccgtgtccacagcctacctgcagatctcctccctgaaagccgaggacacagccgtgtacttctgcgccccctacgacaacttcttcgcctactggggccagggcacaacagtgacagtgtcctccgcttccaccaagggacccagcgtgttccctctggctccttgctccagatccacctccgagtctacagctgctctgggctgcctggtcaaggactactttcctgagcctgtgaccgtgtcctggaactctggcgctctgacatctggcgtgcacacctttccagctgtgctgcagtcctccggcctgtactctctgtcctctgtcgtgaccgtgccttcctctagcctgggcaccaagacctacacctgtaatgtggaccacaagccttccaacaccaaggtggacaagcgcgtggaatctaagtacggccctccttgtcctccatgtcctgctccagagtttctcggcggaccctccgtgttcctgtttcctccaaagcctaaggacaccctgatgatctctcggacccctgaagtgacctgcgtggtggtggatgtgtcccaagaggatcccgaggtgcagttcaattggtacgtggacggcgtggaagtgcacaacgccaagaccaagcctagagaggaacagttcaactccacctacagagtggtgtccgtgctgaccgtgctgcaccaggattggctgaacggcaaagagtacaagtgcaaggtgtccaacaagggcctgccttccagcatcgaaaagaccatctccaaggccaagggccagcctagggaaccccaggtttacaccctgcctccaagccaagaggaaatgaccaagaaccaggtgtccctgacctgcctcgtgaagggcttctacccttccgatatcgccgtggaatgggagagcaatggccagcctgagaacaactacaagacaacccctcctgtgctggactccgacggcagcttcttcctgtattcccgcctgaccgtggacaagtccagatggcaagagggcaacgtgttcagctgctccgtgatgcacgaggccctgcacaatcactacacccagaagtccctgtctctgtccctgggctgatga

SEQ ID NO: 704 - DNA, 1341 bp, Artificial Sequence
  TB006 heavy chain DNA sequence
cagattcaattggttcagagcggctcagaactgaaaaagcctggagccagcgttaaagtgagctgtaaagccagtggatacacattcaccacttacgtcatgtcctgggttagacaggcccctggacaggggctggaatggatgggctggataaacactcactctggagtgcccacatacgccgacgactttacaggcaggttcgtgttttccctagatactagtgtgaatactgcatacttgcaaatctcttctctgaaagcagaggataccgccgtgtacttttgcacccgcgatgggaatgatggggatgccatggacaactggggccaggggacgactgtgacagtgtcttcagctagcaccaagggccccagcgtgtttcctctcgctccctgcagccggagcacatccgagagcaccgctgctctgggctgtctcgtgaaggactacttccctgaacccgtcaccgtcagctggaatagcggcgccctgacatccggcgtccacacattccccgctgtcctgcagagcagcggcctgtacagcctgagctccgtggtcaccgtgcctagcagcagcctgggaacaaagacctacacctgcaacgtggaccataagccctccaacaccaaggtggacaagcgggtggaatccaagtatggacccccctgtcctccttgccctgctcctgaatttctcggaggcccctccgtcttcctgtttccccccaagcccaaggacaccctgatgatctcccggacacccgaagtcacctgcgtcgtggtggatgtcagccaggaagatcccgaggtgcagttcaactggtacgtggacggagtggaggtgcataacgccaaaaccaagcccagggaagagcagttcaacagcacctatcgggtcgtgtccgtgctcaccgtcctgcatcaggattggctcaacggcaaggagtacaagtgcaaggtgtccaacaagggcctgccctcctccatcgagaagaccatctccaaggctaagggccaacctcgggagccccaagtgtataccctccctcccagccaggaggagatgaccaagaatcaagtgagcctgacctgcctcgtgaagggattttacccctccgacatcgctgtggaatgggaaagcaatggccaacctgagaacaactacaagaccacaccccccgtgctggactccgatggctccttcttcctgtacagcaggctgaccgtggacaaatcccggtggcaagagggaaacgtgttcagctgctccgtgatgcacgaggctctccacaaccactacacccagaagagcctctccctgagcctcggctagtaa

SEQ ID NO: 705 - DNA, 1350 bp, Artificial Sequence
  12G5.D7 heavy chain DNA sequence
caggtgcagctgaagcagtctggggctgagctggtgaggcctggggcttcagtgaagctgtcctgcaaggcttctggctacactttcactgactactatataaactgggtgaagcagaggcctggacagggacttgagtggattgcaaggatttatcctggaactggtaatactgactacaatgagaagttcaagggcagggccacactgactgcagaaaactcctccagcactgcctacatgcagctcagcagtctgacatctgaggactctgctgtctatttctgtgcaagatttgcgtattactacggtagtggagggtactttgactactggggccacggcaccactctcacagtctcctcagctagcaccaagggccccagcgtgtttcctctcgctccctgcagccggagcacatccgagagcaccgctgctctgggctgtctcgtgaaggactacttccctgaacccgtcaccgtcagctggaatagcggcgccctgacatccggcgtccacacattccccgctgtcctgcagagcagcggcctgtacagcctgagctccgtggtcaccgtgcctagcagcagcctgggaacaaagacctacacctgcaacgtggaccataagccctccaacaccaaggtggacaagcgggtggaatccaagtatggacccccctgtcctccttgccctgctcctgaatttctcggaggcccctccgtcttcctgtttccccccaagcccaaggacaccctgatgatctcccggacacccgaagtcacctgcgtcgtggtggatgtcagccaggaagatcccgaggtgcagttcaactggtacgtggacggagtggaggtgcataacgccaaaaccaagcccagggaagagcagttcaacagcacctatcgggtcgtgtccgtgctcaccgtcctgcatcaggattggctcaacggcaaggagtacaagtgcaaggtgtccaacaagggcctgccctcctccatcgagaagaccatctccaaggctaagggccaacctcgggagccccaagtgtataccctccctcccagccaggaggagatgaccaagaatcaagtgagcctgacctgcctcgtgaagggattttacccctccgacatcgctgtggaatgggaaagcaatggccaacctgagaacaactacaagaccacaccccccgtgctggactccgatggctccttcttcctgtacagcaggctgaccgtggacaaatcccggtggcaagagggaaacgtgttcagctgctccgtgatgcacgaggctctccacaaccactacacccagaagagcctctccctgagcctcggctagtaa

SEQ ID NO: 706 - DNA, 1341 bp, Artificial Sequence
  13A12.2E5 heavy chain DNA sequence
cagatccagttggtacagtctggacctgagctgaagaagcctggagagacagtcaagatctcctgcaagacttctgggtataaattcaaaacctatgtgatgagctgggtgaaacaggctccaggaaaggctttaaagtggatgggctggataaacacctactctggagtgccaacatatgctgatgacttcaagggacgatttgccttctctttggaaacctctgccagcactgcctatttggagatcatcaacctcaaaaatgaggacacggctacatatttctgtgcaagagatggtaactacggggatcctatggactactggggtcaaggaacctcagtcaccgtctcctcagctagcaccaagggccccagcgtgtttcctctcgctccctgcagccggagcacatccgagagcaccgctgctctgggctgtctcgtgaaggactacttccctgaacccgtcaccgtcagctggaatagcggcgccctgacatccggcgtccacacattccccgctgtcctgcagagcagcggcctgtacagcctgagctccgtggtcaccgtgcctagcagcagcctgggaacaaagacctacacctgcaacgtggaccataagccctccaacaccaaggtggacaagcgggtggaatccaagtatggacccccctgtcctccttgccctgctcctgaatttctcggaggcccctccgtcttcctgtttccccccaagcccaaggacaccctgatgatctcccggacacccgaagtcacctgcgtcgtggtggatgtcagccaggaagatcccgaggtgcagttcaactggtacgtggacggagtggaggtgcataacgccaaaaccaagcccagggaagagcagttcaacagcacctatcgggtcgtgtccgtgctcaccgtcctgcatcaggattggctcaacggcaaggagtacaagtgcaaggtgtccaacaagggcctgccctcctccatcgagaagaccatctccaaggctaagggccaacctcgggagccccaagtgtataccctccctcccagccaggaggagatgaccaagaatcaagtgagcctgacctgcctcgtgaagggattttacccctccgacatcgctgtggaatgggaaagcaatggccaacctgagaacaactacaagaccacaccccccgtgctggactccgatggctccttcttcctgtacagcaggctgaccgtggacaaatcccggtggcaagagggaaacgtgttcagctgctccgtgatgcacgaggctctccacaaccactacacccagaagagcctctccctgagcctcggctagtaa

SEQ ID NO: 707 - DNA, 1335 bp, Artificial Sequence
  14H10.2C9 heavy chain DNA sequence
cagatccagttggtacagtctggacctgagctgaagaagcctggagagacagtcaagatctcctgcaaggcttctgggtataccttcacaacctatggaatgggctgggtgaaacaggctccaggaaaggatttaaagtggatgggctggataaacacctactctggagtgccaacatatgctgatgacttcaagggacggtttgccttctctttggaaacctctgccagcactgcctatttgcagatcagcaacctcaaaaatgaagacacggctacatatttctgttcaaccccttatgaatacgacggggcttactggggccaggggactctggtcactgtctctgcagctagcaccaagggccccagcgtgtttcctctcgctccctgcagccggagcacatccgagagcaccgctgctctgggctgtctcgtgaaggactacttccctgaacccgtcaccgtcagctggaatagcggcgccctgacatccggcgtccacacattccccgctgtcctgcagagcagcggcctgtacagcctgagctccgtggtcaccgtgcctagcagcagcctgggaacaaagacctacacctgcaacgtggaccataagccctccaacaccaaggtggacaagcgggtggaatccaagtatggacccccctgtcctccttgccctgctcctgaatttctcggaggcccctccgtcttcctgtttccccccaagcccaaggacaccctgatgatctcccggacacccgaagtcacctgcgtcgtggtggatgtcagccaggaagatcccgaggtgcagttcaactggtacgtggacggagtggaggtgcataacgccaaaaccaagcccagggaagagcagttcaacagcacctatcgggtcgtgtccgtgctcaccgtcctgcatcaggattggctcaacggcaaggagtacaagtgcaaggtgtccaacaagggcctgccctcctccatcgagaagaccatctccaaggctaagggccaacctcgggagccccaagtgtataccctccctcccagccaggaggagatgaccaagaatcaagtgagcctgacctgcctcgtgaagggattttacccctccgacatcgctgtggaatgggaaagcaatggccaacctgagaacaactacaagaccacaccccccgtgctggactccgatggctccttcttcctgtacagcaggctgaccgtggacaaatcccggtggcaagagggaaacgtgttcagctgctccgtgatgcacgaggctctccacaaccactacacccagaagagcctctccctgagcctcggctagtaa

SEQ ID NO: 708 - DNA, 1323 bp, Artificial Sequence
  15F10.2D6 heavy chain DNA sequence
gaagtacagctggtggagtctgggggaggcttagtgaagcctggagggtccctgaaactctcctgtgcagcctctggattcgctttcagttcctatgccatgtcttgggttcgccagactccggaaaagaggctggagtgggtcgcaaccattagtgatggtggtgtttacacctactatacagaccatgtaaagggccgattcaccatctccagagacaatgccgaggacaacctgtacctgcaaatgagccatctgaagtctgaggacacagccatgtattattgtgtgagagatgggggctactggggccaaggcaccactctcacagtctcctcagctagcaccaagggccccagcgtgtttcctctcgctccctgcagccggagcacatccgagagcaccgctgctctgggctgtctcgtgaaggactacttccctgaacccgtcaccgtcagctggaatagcggcgccctgacatccggcgtccacacattccccgctgtcctgcagagcagcggcctgtacagcctgagctccgtggtcaccgtgcctagcagcagcctgggaacaaagacctacacctgcaacgtggaccataagccctccaacaccaaggtggacaagcgggtggaatccaagtatggacccccctgtcctccttgccctgctcctgaatttctcggaggcccctccgtcttcctgtttccccccaagcccaaggacaccctgatgatctcccggacacccgaagtcacctgcgtcgtggtggatgtcagccaggaagatcccgaggtgcagttcaactggtacgtggacggagtggaggtgcataacgccaaaaccaagcccagggaagagcagttcaacagcacctatcgggtcgtgtccgtgctcaccgtcctgcatcaggattggctcaacggcaaggagtacaagtgcaaggtgtccaacaagggcctgccctcctccatcgagaagaccatctccaaggctaagggccaacctcgggagccccaagtgtataccctccctcccagccaggaggagatgaccaagaatcaagtgagcctgacctgcctcgtgaagggattttacccctccgacatcgctgtggaatgggaaagcaatggccaacctgagaacaactacaagaccacaccccccgtgctggactccgatggctccttcttcctgtacagcaggctgaccgtggacaaatcccggtggcaagagggaaacgtgttcagctgctccgtgatgcacgaggctctccacaaccactacacccagaagagcctctccctgagcctcggctagtaa

SEQ ID NO: 709 - DNA, 1332 bp, Artificial Sequence
  19B5.2E6 heavy chain DNA sequence
cagatccaacttgttcagagcgggcctgaattgaagaaaccaggcgagactgtaaagatctcctgtaaggccagtggctatacattcaccacctacgcaatgagctgggtcaagcaggcacccggaaagggtctgaagtggatgggttggataaatacatactcaggcgtcccaacctacgctgatgatttgaaggggcgctttgccttttctcttgaaacctcagcatcaaccgcctacttgcagataaataacctcaaaaatgaagacaccgctacctatttctgcgcaagggggccttatgctatggactactggggccagggcacctctgtgactgtaagttctgctagcaccaagggccccagcgtgtttcctctcgctccctgcagccggagcacatccgagagcaccgctgctctgggctgtctcgtgaaggactacttccctgaacccgtcaccgtcagctggaatagcggcgccctgacatccggcgtccacacattccccgctgtcctgcagagcagcggcctgtacagcctgagctccgtggtcaccgtgcctagcagcagcctgggaacaaagacctacacctgcaacgtggaccataagccctccaacaccaaggtggacaagcgggtggaatccaagtatggacccccctgtcctccttgccctgctcctgaatttctcggaggcccctccgtcttcctgtttccccccaagcccaaggacaccctgatgatctcccggacacccgaagtcacctgcgtcgtggtggatgtcagccaggaagatcccgaggtgcagttcaactggtacgtggacggagtggaggtgcataacgccaaaaccaagcccagggaagagcagttcaacagcacctatcgggtcgtgtccgtgctcaccgtcctgcatcaggattggctcaacggcaaggagtacaagtgcaaggtgtccaacaagggcctgccctcctccatcgagaagaccatctccaaggctaagggccaacctcgggagccccaagtgtataccctccctcccagccaggaggagatgaccaagaatcaagtgagcctgacctgcctcgtgaagggattttacccctccgacatcgctgtggaatgggaaagcaatggccaacctgagaacaactacaagaccacaccccccgtgctggactccgatggctccttcttcctgtacagcaggctgaccgtggacaaatcccggtggcaagagggaaacgtgttcagctgctccgtgatgcacgaggctctccacaaccactacacccagaagagcctctccctgagcctcggctagtaa

SEQ ID NO: 710 - DNA, 1329 bp, Artificial Sequence
  20D11.2C6 heavy chain DNA sequence
gaggtccagctgcaacaatctggacctgaactggtgaagcctggggcttcagtgaagatatcctgtaaggcttctggatacacgttcactgacttctacataaactgggtgaagcagagccatggaaagagccttgagtggattggagatattaatcctaagaatggtggtattaactacaacccgaagttcaagatcaaggccacattgactgtagacaagtcctccagcacatcctacatggacctccgcggcctgacatctgaggactctgcagtctattactgcacctcaggctacggatttccttactggggccaagggactctggtcactgtctctgcagctagcaccaagggccccagcgtgtttcctctcgctccctgcagccggagcacatccgagagcaccgctgctctgggctgtctcgtgaaggactacttccctgaacccgtcaccgtcagctggaatagcggcgccctgacatccggcgtccacacattccccgctgtcctgcagagcagcggcctgtacagcctgagctccgtggtcaccgtgcctagcagcagcctgggaacaaagacctacacctgcaacgtggaccataagccctccaacaccaaggtggacaagcgggtggaatccaagtatggacccccctgtcctccttgccctgctcctgaatttctcggaggcccctccgtcttcctgtttccccccaagcccaaggacaccctgatgatctcccggacacccgaagtcacctgcgtcgtggtggatgtcagccaggaagatcccgaggtgcagttcaactggtacgtggacggagtggaggtgcataacgccaaaaccaagcccagggaagagcagttcaacagcacctatcgggtcgtgtccgtgctcaccgtcctgcatcaggattggctcaacggcaaggagtacaagtgcaaggtgtccaacaagggcctgccctcctccatcgagaagaccatctccaaggctaagggccaacctcgggagccccaagtgtataccctccctcccagccaggaggagatgaccaagaatcaagtgagcctgacctgcctcgtgaagggattttacccctccgacatcgctgtggaatgggaaagcaatggccaacctgagaacaactacaagaccacaccccccgtgctggactccgatggctccttcttcctgtacagcaggctgaccgtggacaaatcccggtggcaagagggaaacgtgttcagctgctccgtgatgcacgaggctctccacaaccactacacccagaagagcctctccctgagcctcggctagtaa

SEQ ID NO: 711 - DNA, 1332 bp, Artificial Sequence
  20H5.A3 heavy chain DNA sequence
cagatccagttggtacagtctggacctgagctgaagaagcctggagagtcagtcaagatctcctgcaaggcttctggttatgccttcacaacctatggaatgagctgggtgcaacaggctccaggaaagggtttaaagtggatgggctgggtaaacacctactctggagtgccaacatgtgctgatgacttcaagggacggtttgccttctctttggaaacctctgccagcactgcctatttgcagatcaacaacctcagaaatgaggacacggctacatatttctgtgcaagagggccctatgctatggactactggggtcaaggaacctcagtcaccgtctcctcagctagcaccaagggccccagcgtgtttcctctcgctccctgcagccggagcacatccgagagcaccgctgctctgggctgtctcgtgaaggactacttccctgaacccgtcaccgtcagctggaatagcggcgccctgacatccggcgtccacacattccccgctgtcctgcagagcagcggcctgtacagcctgagctccgtggtcaccgtgcctagcagcagcctgggaacaaagacctacacctgcaacgtggaccataagccctccaacaccaaggtggacaagcgggtggaatccaagtatggacccccctgtcctccttgccctgctcctgaatttctcggaggcccctccgtcttcctgtttccccccaagcccaaggacaccctgatgatctcccggacacccgaagtcacctgcgtcgtggtggatgtcagccaggaagatcccgaggtgcagttcaactggtacgtggacggagtggaggtgcataacgccaaaaccaagcccagggaagagcagttcaacagcacctatcgggtcgtgtccgtgctcaccgtcctgcatcaggattggctcaacggcaaggagtacaagtgcaaggtgtccaacaagggcctgccctcctccatcgagaagaccatctccaaggctaagggccaacctcgggagccccaagtgtataccctccctcccagccaggaggagatgaccaagaatcaagtgagcctgacctgcctcgtgaagggattttacccctccgacatcgctgtggaatgggaaagcaatggccaacctgagaacaactacaagaccacaccccccgtgctggactccgatggctccttcttcctgtacagcaggctgaccgtggacaaatcccggtggcaagagggaaacgtgttcagctgctccgtgatgcacgaggctctccacaaccactacacccagaagagcctctccctgagcctcggctagtaa

SEQ ID NO: 712 - DNA, 1332 bp, Artificial Sequence
  23H9.2E4 heavy chain DNA sequence
cagatccagttggtacagtctggacctgagctgaagaagcctggagagacagtcaagatctcctgcaaggcttctgggtataccttcacaacctatgcaatgagctgggtgaaacaggctccaggaaagggtttaaagtggatgggctggataaacacctactctggagtgccaacatatgctgatgacctcaagggacggtttgccttctctttggaaacctctgccagcactgcctatttgcagatcaacaacctcaaaaatgaggacacggctacatatttctgtgcaagagggccctatgctatggactactggggtcaaggaacctcagtcaccgtctcctcagctagcaccaagggccccagcgtgtttcctctcgctccctgcagccggagcacatccgagagcaccgctgctctgggctgtctcgtgaaggactacttccctgaacccgtcaccgtcagctggaatagcggcgccctgacatccggcgtccacacattccccgctgtcctgcagagcagcggcctgtacagcctgagctccgtggtcaccgtgcctagcagcagcctgggaacaaagacctacacctgcaacgtggaccataagccctccaacaccaaggtggacaagcgggtggaatccaagtatggacccccctgtcctccttgccctgctcctgaatttctcggaggcccctccgtcttcctgtttccccccaagcccaaggacaccctgatgatctcccggacacccgaagtcacctgcgtcgtggtggatgtcagccaggaagatcccgaggtgcagttcaactggtacgtggacggagtggaggtgcataacgccaaaaccaagcccagggaagagcagttcaacagcacctatcgggtcgtgtccgtgctcaccgtcctgcatcaggattggctcaacggcaaggagtacaagtgcaaggtgtccaacaagggcctgccctcctccatcgagaagaccatctccaaggctaagggccaacctcgggagccccaagtgtataccctccctcccagccaggaggagatgaccaagaatcaagtgagcctgacctgcctcgtgaagggattttacccctccgacatcgctgtggaatgggaaagcaatggccaacctgagaacaactacaagaccacaccccccgtgctggactccgatggctccttcttcctgtacagcaggctgaccgtggacaaatcccggtggcaagagggaaacgtgttcagctgctccgtgatgcacgaggctctccacaaccactacacccagaagagcctctccctgagcctcggctagtaa

SEQ ID NO: 713 - DNA, 1344 bp, Artificial Sequence
  2D10-VH0-VL0 heavy chain DNA sequence
caagtacagctccagcaatcaggacctgaacttgttaagccaggtgcaagcgtcaaaataagttgtaaagcatcaggttacacctttacagactactatatcaactgggtcaagcaacggcctggtcagggacttgaatggataggttggatctaccctgggtcacaagacaccaagtacaatgaaaaatttaaggggaaagccactctgacagtagatactagctcaagtaccgcctacatgcagctcggcagcctcacttccgaggactctgccgtatatttctgtgccaactacttcgggtcttctgggtggttctttgatgtgtggggaaccggcaccaccgtaaccgtttcctcagctagcaccaagggccccagcgtgtttcctctcgctccctgcagccggagcacatccgagagcaccgctgctctgggctgtctcgtgaaggactacttccctgaacccgtcaccgtcagctggaatagcggcgccctgacatccggcgtccacacattccccgctgtcctgcagagcagcggcctgtacagcctgagctccgtggtcaccgtgcctagcagcagcctgggaacaaagacctacacctgcaacgtggaccataagccctccaacaccaaggtggacaagcgggtggaatccaagtatggacccccctgtcctccttgccctgctcctgaatttctcggaggcccctccgtcttcctgtttccccccaagcccaaggacaccctgatgatctcccggacacccgaagtcacctgcgtcgtggtggatgtcagccaggaagatcccgaggtgcagttcaactggtacgtggacggagtggaggtgcataacgccaaaaccaagcccagggaagagcagttcaacagcacctatcgggtcgtgtccgtgctcaccgtcctgcatcaggattggctcaacggcaaggagtacaagtgcaaggtgtccaacaagggcctgccctcctccatcgagaagaccatctccaaggctaagggccaacctcgggagccccaagtgtataccctccctcccagccaggaggagatgaccaagaatcaagtgagcctgacctgcctcgtgaagggattttacccctccgacatcgctgtggaatgggaaagcaatggccaacctgagaacaactacaagaccacaccccccgtgctggactccgatggctccttcttcctgtacagcaggctgaccgtggacaaatcccggtggcaagagggaaacgtgttcagctgctccgtgatgcacgaggctctccacaaccactacacccagaagagcctctccctgagcctcggctagtaa

SEQ ID NO: 714 - DNA, 1341 bp, Artificial Sequence
  3B11.2G2 heavy chain DNA sequence
cagatccagttggtacagtctggacctgagctgaagaagcctggagagacagtcaagatctcctgcaagacttctgggtataaattcaaaacctatgtaatgagctgggtgaaacaggctccaggaaaggctttaaagtggatgggctggataaacacctactctggagtgccaacatatgctgatgacttcaagggacggtttgccttctctttggaaacctctgccagcactgcctatttggagatcatcaacctcaaaaatgaggacacggctacatatttctgtgcaagagatggtaattacggggatcctatggactactggggtcaaggaacctcagtcaccgtctcctcagctagcaccaagggccccagcgtgtttcctctcgctccctgcagccggagcacatccgagagcaccgctgctctgggctgtctcgtgaaggactacttccctgaacccgtcaccgtcagctggaatagcggcgccctgacatccggcgtccacacattccccgctgtcctgcagagcagcggcctgtacagcctgagctccgtggtcaccgtgcctagcagcagcctgggaacaaagacctacacctgcaacgtggaccataagccctccaacaccaaggtggacaagcgggtggaatccaagtatggacccccctgtcctccttgccctgctcctgaatttctcggaggcccctccgtcttcctgtttccccccaagcccaaggacaccctgatgatctcccggacacccgaagtcacctgcgtcgtggtggatgtcagccaggaagatcccgaggtgcagttcaactggtacgtggacggagtggaggtgcataacgccaaaaccaagcccagggaagagcagttcaacagcacctatcgggtcgtgtccgtgctcaccgtcctgcatcaggattggctcaacggcaaggagtacaagtgcaaggtgtccaacaagggcctgccctcctccatcgagaagaccatctccaaggctaagggccaacctcgggagccccaagtgtataccctccctcccagccaggaggagatgaccaagaatcaagtgagcctgacctgcctcgtgaagggattttacccctccgacatcgctgtggaatgggaaagcaatggccaacctgagaacaactacaagaccacaccccccgtgctggactccgatggctccttcttcctgtacagcaggctgaccgtggacaaatcccggtggcaagagggaaacgtgttcagctgctccgtgatgcacgaggctctccacaaccactacacccagaagagcctctccctgagcctcggctagtaa

SEQ ID NO: 715 - DNA, 1323 bp, Artificial Sequence
  7D8.2D8 heavy chain DNA sequence
gaagtgcagctggtggagtctgggggaggcttagtgaagcctggagggtccctgaaactctcctgtgcagcctctggattcactttcagtagctatgccatgtcttgggttcgccagactccggaaaagaggctggagtgggtcgcaaccatcagtgatggtggtatttacacctactatccagacaatgtaaagggccgattcaccatttccagagacaatgccaagaacaacctgttcctgcaaatgagccatctgaagtctgaggatacagccatgtattactgtgtaagagatgggggctactggggccaaggcaccactctcacagtctcctcagctagcaccaagggccccagcgtgtttcctctcgctccctgcagccggagcacatccgagagcaccgctgctctgggctgtctcgtgaaggactacttccctgaacccgtcaccgtcagctggaatagcggcgccctgacatccggcgtccacacattccccgctgtcctgcagagcagcggcctgtacagcctgagctccgtggtcaccgtgcctagcagcagcctgggaacaaagacctacacctgcaacgtggaccataagccctccaacaccaaggtggacaagcgggtggaatccaagtatggacccccctgtcctccttgccctgctcctgaatttctcggaggcccctccgtcttcctgtttccccccaagcccaaggacaccctgatgatctcccggacacccgaagtcacctgcgtcgtggtggatgtcagccaggaagatcccgaggtgcagttcaactggtacgtggacggagtggaggtgcataacgccaaaaccaagcccagggaagagcagttcaacagcacctatcgggtcgtgtccgtgctcaccgtcctgcatcaggattggctcaacggcaaggagtacaagtgcaaggtgtccaacaagggcctgccctcctccatcgagaagaccatctccaaggctaagggccaacctcgggagccccaagtgtataccctccctcccagccaggaggagatgaccaagaatcaagtgagcctgacctgcctcgtgaagggattttacccctccgacatcgctgtggaatgggaaagcaatggccaacctgagaacaactacaagaccacaccccccgtgctggactccgatggctccttcttcctgtacagcaggctgaccgtggacaaatcccggtggcaagagggaaacgtgttcagctgctccgtgatgcacgaggctctccacaaccactacacccagaagagcctctccctgagcctcggctagtaa

SEQ ID NO: 716 - DNA, 1344 bp, Artificial Sequence
  mIMT001 heavy chain DNA sequence
cagatccaacttgtgcagtcaggtccagaattgaagaagcctggtgagaccgtcaagatttcctgtaaggcctctggttatacttttaccaactatggcatgaattgggtcaagcaggcacctgggaagggtttgaaatggatggggtggataaataccaacacaggggaaccaacttacgttgaagagtttaagggtcgttttgcattcagtcttgagacttctgcaagcacagcttacctccaaattaacaatctcaaaaatgaagatactgctacatatttctgtgctccttatgataattttttcgcctactggggacagggaactctggtcaccgtctcagcagctaagactactcctcccagtgtctaccccctggcccccgtgtgcggcgacacaacaggctcctccgtgacactgggctgcctggtgaaaggctacttccccgagcccgtgacactgacatggaactccggctccctgtcctccggcgtgcacacattccccgccgtgctgcagtccgacctgtacacactgtcctcctccgtgacagtgacatcctccacatggccctcccagtccatcacatgcaacgtggcccaccccgcctcctccacaaaagtggacaaaaaaatcgagcccaggggccccacaatcaaaccctgccccccctgcaaatgccccgcccccaacgccgccggcggcccctccgtgttcatcttcccccccaaaatcaaagacgtgctgatgatctccctgtcccccatcgtgacatgcgtggtggtggacgtgtccgaggacgaccccgacgtgcagatctcctggttcgtgaacaacgtggaggtgcacacagcccagacacagacacacagggaggactacaactccacactgagggtggtgtccgccctgcccatccagcaccaggactggatgtccggcaaagagttcaaatgcaaagtgaacaacaaagacctgggcgcccccatcgagaggacaatctccaaacccaaaggctccgtgagggccccccaggtgtacgtgctgcccccccccgaggaggagatgacaaaaaaacaggtgacactgacatgcatggtgacagacttcatgcccgaggacatctacgtggagtggacaaacaacggcaaaacagagctgaactacaaaaacacagagcccgtgctggactccgacggctcctacttcatgtactccaaactgagggtggagaaaaaaaactgggtggagaggaactcctactcctgctccgtggtgcacgagggcctgcacaaccaccacacaacaaaatccttctccaggacacccggcaaatagtaa

SEQ ID NO: 717 - DNA, 1332 bp, Artificial Sequence
  4A11.2B5 heavy chain DNA sequence
caggtacaacttcagcagagcggtccagaacttgtgaagcccggtgctagtgtcaaaatatcttgcaaagcaagtggttattccttcaccaactattacatacactgggtaaaacaacgtccagggcaaggactcgaatggattggttggatctaccccggcagcggcaacactaactacaacgagaagtttaaaggcaaagctactctcacagcagacacttctagcagtacaacaaatatgcagttgtcctctctgacttccgaagacagcgccgtctattactgttctactgcacccggaggttttgacgtctggggttccggcaccacagttaccgttagttccgctagcaccaagggccccagcgtgtttcctctcgctccctgcagccggagcacatccgagagcaccgctgctctgggctgtctcgtgaaggactacttccctgaacccgtcaccgtcagctggaatagcggcgccctgacatccggcgtccacacattccccgctgtcctgcagagcagcggcctgtacagcctgagctccgtggtcaccgtgcctagcagcagcctgggaacaaagacctacacctgcaacgtggaccataagccctccaacaccaaggtggacaagcgggtggaatccaagtatggacccccctgtcctccttgccctgctcctgaatttctcggaggcccctccgtcttcctgtttccccccaagcccaaggacaccctgatgatctcccggacacccgaagtcacctgcgtcgtggtggatgtcagccaggaagatcccgaggtgcagttcaactggtacgtggacggagtggaggtgcataacgccaaaaccaagcccagggaagagcagttcaacagcacctatcgggtcgtgtccgtgctcaccgtcctgcatcaggattggctcaacggcaaggagtacaagtgcaaggtgtccaacaagggcctgccctcctccatcgagaagaccatctccaaggctaagggccaacctcgggagccccaagtgtataccctccctcccagccaggaggagatgaccaagaatcaagtgagcctgacctgcctcgtgaagggattttacccctccgacatcgctgtggaatgggaaagcaatggccaacctgagaacaactacaagaccacaccccccgtgctggactccgatggctccttcttcctgtacagcaggctgaccgtggacaaatcccggtggcaagagggaaacgtgttcagctgctccgtgatgcacgaggctctccacaaccactacacccagaagagcctctccctgagcctcggctagtaa

SEQ ID NO: 718 - DNA, 1332 bp, Artificial Sequence
  4A11.H1L1 heavy chain DNA sequence
caggtgcagctggtgcaatcaggagccgaagttaagaagcctggcgccagcgtcaaggtctcatgtaaagcctccggttacagtttcaccaactactatatgcactgggttaggcaagcaccaggccaggggcttgagtggatgggatggatctatccagggagcggtaacaccaattacaatgagaagtttcaagggcgcgtaaccatgacagcagataccagtataagcaccgcctatatggaactctctcggttgagatccgatgataccgctgtttattactgctctaccgcacctggtggtttcgacgtttggggccaaggtactacagtgaccgtatcatcagctagcaccaagggccccagcgtgtttcctctcgctccctgcagccggagcacatccgagagcaccgctgctctgggctgtctcgtgaaggactacttccctgaacccgtcaccgtcagctggaatagcggcgccctgacatccggcgtccacacattccccgctgtcctgcagagcagcggcctgtacagcctgagctccgtggtcaccgtgcctagcagcagcctgggaacaaagacctacacctgcaacgtggaccataagccctccaacaccaaggtggacaagcgggtggaatccaagtatggacccccctgtcctccttgccctgctcctgaatttctcggaggcccctccgtcttcctgtttccccccaagcccaaggacaccctgatgatctcccggacacccgaagtcacctgcgtcgtggtggatgtcagccaggaagatcccgaggtgcagttcaactggtacgtggacggagtggaggtgcataacgccaaaaccaagcccagggaagagcagttcaacagcacctatcgggtcgtgtccgtgctcaccgtcctgcatcaggattggctcaacggcaaggagtacaagtgcaaggtgtccaacaagggcctgccctcctccatcgagaagaccatctccaaggctaagggccaacctcgggagccccaagtgtataccctccctcccagccaggaggagatgaccaagaatcaagtgagcctgacctgcctcgtgaagggattttacccctccgacatcgctgtggaatgggaaagcaatggccaacctgagaacaactacaagaccacaccccccgtgctggactccgatggctccttcttcctgtacagcaggctgaccgtggacaaatcccggtggcaagagggaaacgtgttcagctgctccgtgatgcacgaggctctccacaaccactacacccagaagagcctctccctgagcctcggctagtaa

SEQ ID NO: 719 - DNA, 1332 bp, Artificial Sequence
  4A11.H4L2 heavy chain DNA sequence
caggtgcaactggtccagtctggggccgaggtcaaaaagcctggagcctccgtcaaagtgtcatgtaaagcctcagggtatagtttcaccaactactatatacattgggtcagacaagccccaggccagcgtcttgagtggatgggatggatttatcccggatcagggaatacaaactataacgagaaatttcaaggcagagttactctcactgccgatacctctgcaagtactacctatatggagctctccagtctcagaagcgaagacacagcagtatattactgtagcaccgccccaggcgggtttgacgtgtggggccaaggcactactgtaaccgttagctcagctagcaccaagggccccagcgtgtttcctctcgctccctgcagccggagcacatccgagagcaccgctgctctgggctgtctcgtgaaggactacttccctgaacccgtcaccgtcagctggaatagcggcgccctgacatccggcgtccacacattccccgctgtcctgcagagcagcggcctgtacagcctgagctccgtggtcaccgtgcctagcagcagcctgggaacaaagacctacacctgcaacgtggaccataagccctccaacaccaaggtggacaagcgggtggaatccaagtatggacccccctgtcctccttgccctgctcctgaatttctcggaggcccctccgtcttcctgtttccccccaagcccaaggacaccctgatgatctcccggacacccgaagtcacctgcgtcgtggtggatgtcagccaggaagatcccgaggtgcagttcaactggtacgtggacggagtggaggtgcataacgccaaaaccaagcccagggaagagcagttcaacagcacctatcgggtcgtgtccgtgctcaccgtcctgcatcaggattggctcaacggcaaggagtacaagtgcaaggtgtccaacaagggcctgccctcctccatcgagaagaccatctccaaggctaagggccaacctcgggagccccaagtgtataccctccctcccagccaggaggagatgaccaagaatcaagtgagcctgacctgcctcgtgaagggattttacccctccgacatcgctgtggaatgggaaagcaatggccaacctgagaacaactacaagaccacaccccccgtgctggactccgatggctccttcttcctgtacagcaggctgaccgtggacaaatcccggtggcaagagggaaacgtgttcagctgctccgtgatgcacgaggctctccacaaccactacacccagaagagcctctccctgagcctcggctagtaa

SEQ ID NO: 720 - DNA, 1341 bp, Artificial Sequence
  4G2.2G6 heavy chain DNA sequence
caaatacagctcgtgcagtctggtcccgatttgaagaagcctggagaaaccgtaaagataagctgtaaggctagtggttacactttcacaacatacgttatgtcatgggttaaacaggctcctggaaaagaccttaaatggatgggatggattaacacccatagcggtgtcccaacttacgctgacgattttaagggacgatttgacttttctctcgaaacttctgccaacacagcttttttgcagatcaacaatctcaagaatgaagacaccgcaacctatttctgcactcgagatgggaacgacggggatgcaatggataactggggacaaggcacatcagttaccgtgagctctgctagcaccaagggccccagcgtgtttcctctcgctccctgcagccggagcacatccgagagcaccgctgctctgggctgtctcgtgaaggactacttccctgaacccgtcaccgtcagctggaatagcggcgccctgacatccggcgtccacacattccccgctgtcctgcagagcagcggcctgtacagcctgagctccgtggtcaccgtgcctagcagcagcctgggaacaaagacctacacctgcaacgtggaccataagccctccaacaccaaggtggacaagcgggtggaatccaagtatggacccccctgtcctccttgccctgctcctgaatttctcggaggcccctccgtcttcctgtttccccccaagcccaaggacaccctgatgatctcccggacacccgaagtcacctgcgtcgtggtggatgtcagccaggaagatcccgaggtgcagttcaactggtacgtggacggagtggaggtgcataacgccaaaaccaagcccagggaagagcagttcaacagcacctatcgggtcgtgtccgtgctcaccgtcctgcatcaggattggctcaacggcaaggagtacaagtgcaaggtgtccaacaagggcctgccctcctccatcgagaagaccatctccaaggctaagggccaacctcgggagccccaagtgtataccctccctcccagccaggaggagatgaccaagaatcaagtgagcctgacctgcctcgtgaagggattttacccctccgacatcgctgtggaatgggaaagcaatggccaacctgagaacaactacaagaccacaccccccgtgctggactccgatggctccttcttcctgtacagcaggctgaccgtggacaaatcccggtggcaagagggaaacgtgttcagctgctccgtgatgcacgaggctctccacaaccactacacccagaagagcctctccctgagcctcggctagtaa

SEQ ID NO: 721 - DNA, 1344 bp, Artificial Sequence
  6B3.2D3 heavy chain DNA sequence
caggtgcagctgaagcagtcaggacctggcctagtgcagccctcacagagcctgtccatcacctgcacagtctctggtttctcattaactagttatggtgtacactgggttcgccagcctccaggaaagggtctggagtggctgggagtgatatggagtggtggaagcacagactataatgctgctttcatatccagactgagcatcagtaaggacaactccaagagccaagttttctttaaaatgaacagtctgcaagctgatgacactgccatatactactgtgccaaagggccttatgattacgacttaggctggtttgcttactggggccaagggactctggtcactgtctctgcagctagcaccaagggccccagcgtgtttcctctcgctccctgcagccggagcacatccgagagcaccgctgctctgggctgtctcgtgaaggactacttccctgaacccgtcaccgtcagctggaatagcggcgccctgacatccggcgtccacacattccccgctgtcctgcagagcagcggcctgtacagcctgagctccgtggtcaccgtgcctagcagcagcctgggaacaaagacctacacctgcaacgtggaccataagccctccaacaccaaggtggacaagcgggtggaatccaagtatggacccccctgtcctccttgccctgctcctgaatttctcggaggcccctccgtcttcctgtttccccccaagcccaaggacaccctgatgatctcccggacacccgaagtcacctgcgtcgtggtggatgtcagccaggaagatcccgaggtgcagttcaactggtacgtggacggagtggaggtgcataacgccaaaaccaagcccagggaagagcagttcaacagcacctatcgggtcgtgtccgtgctcaccgtcctgcatcaggattggctcaacggcaaggagtacaagtgcaaggtgtccaacaagggcctgccctcctccatcgagaagaccatctccaaggctaagggccaacctcgggagccccaagtgtataccctccctcccagccaggaggagatgaccaagaatcaagtgagcctgacctgcctcgtgaagggattttacccctccgacatcgctgtggaatgggaaagcaatggccaacctgagaacaactacaagaccacaccccccgtgctggactccgatggctccttcttcctgtacagcaggctgaccgtggacaaatcccggtggcaagagggaaacgtgttcagctgctccgtgatgcacgaggctctccacaaccactacacccagaagagcctctccctgagcctcggctagtaa

SEQ ID NO: 722 - DNA, 1332 bp, Artificial Sequence
  6H6.2D6 heavy chain DNA sequence
cagatccagctggtgcagtccggccccgagctgaagaagcccggcgagactgtgaagatctcctgcaaggcctccggctacaccttcaccacctacggcatgtcctgggtgaagcaggcccccggcaagggcctgaagtggatggcctggatcaacacctactccggcgtgcccacctacgccgacgacttcaagggcaggttcgccttctccctggagacttccgcctccaccgcctacctgcagatcaacaacctgaccaacgaggacaccgccacctacttctgcgccaggggcccctacgccatggactactggggccagggcacctccgtgaccgtgtcctccgctagcaccaagggccccagcgtgtttcctctcgctccctgcagccggagcacatccgagagcaccgctgctctgggctgtctcgtgaaggactacttccctgaacccgtcaccgtcagctggaatagcggcgccctgacatccggcgtccacacattccccgctgtcctgcagagcagcggcctgtacagcctgagctccgtggtcaccgtgcctagcagcagcctgggaacaaagacctacacctgcaacgtggaccataagccctccaacaccaaggtggacaagcgggtggaatccaagtatggacccccctgtcctccttgccctgctcctgaatttctcggaggcccctccgtcttcctgtttccccccaagcccaaggacaccctgatgatctcccggacacccgaagtcacctgcgtcgtggtggatgtcagccaggaagatcccgaggtgcagttcaactggtacgtggacggagtggaggtgcataacgccaaaaccaagcccagggaagagcagttcaacagcacctatcgggtcgtgtccgtgctcaccgtcctgcatcaggattggctcaacggcaaggagtacaagtgcaaggtgtccaacaagggcctgccctcctccatcgagaagaccatctccaaggctaagggccaacctcgggagccccaagtgtataccctccctcccagccaggaggagatgaccaagaatcaagtgagcctgacctgcctcgtgaagggattttacccctccgacatcgctgtggaatgggaaagcaatggccaacctgagaacaactacaagaccacaccccccgtgctggactccgatggctccttcttcctgtacagcaggctgaccgtggacaaatcccggtggcaagagggaaacgtgttcagctgctccgtgatgcacgaggctctccacaaccactacacccagaagagcctctccctgagcctcggctagtaa

SEQ ID NO: 723 - DNA, 1329 bp, Artificial Sequence
  9H2.2H10 heavy chain DNA sequence
caggtccagctgcagcagcctggggctgaactggtggggcctgggtcttcagtgaagctgtcctgcaaggcttctggctacaccttcaccaactactggatacattgggtgaagcagaggcctctacaaggccttgaatggattggtaacattgacccttctgatagtgaaactcactacaatcaaaagttcaaggacaaggccacattgactgtagacaaatcctccagcacagcctacatgcaactcagcagcctgacatctgaggactctgcggtctattactgtgcaagacatggttactacgactactggggccaaggcaccactctcacagtctcctcagctagcaccaagggccccagcgtgtttcctctcgctccctgcagccggagcacatccgagagcaccgctgctctgggctgtctcgtgaaggactacttccctgaacccgtcaccgtcagctggaatagcggcgccctgacatccggcgtccacacattccccgctgtcctgcagagcagcggcctgtacagcctgagctccgtggtcaccgtgcctagcagcagcctgggaacaaagacctacacctgcaacgtggaccataagccctccaacaccaaggtggacaagcgggtggaatccaagtatggacccccctgtcctccttgccctgctcctgaatttctcggaggcccctccgtcttcctgtttccccccaagcccaaggacaccctgatgatctcccggacacccgaagtcacctgcgtcgtggtggatgtcagccaggaagatcccgaggtgcagttcaactggtacgtggacggagtggaggtgcataacgccaaaaccaagcccagggaagagcagttcaacagcacctatcgggtcgtgtccgtgctcaccgtcctgcatcaggattggctcaacggcaaggagtacaagtgcaaggtgtccaacaagggcctgccctcctccatcgagaagaccatctccaaggctaagggccaacctcgggagccccaagtgtataccctccctcccagccaggaggagatgaccaagaatcaagtgagcctgacctgcctcgtgaagggattttacccctccgacatcgctgtggaatgggaaagcaatggccaacctgagaacaactacaagaccacaccccccgtgctggactccgatggctccttcttcctgtacagcaggctgaccgtggacaaatcccggtggcaagagggaaacgtgttcagctgctccgtgatgcacgaggctctccacaaccactacacccagaagagcctctccctgagcctcggctagtaa

SEQ ID NO: 724 - DNA, 1341 bp, Artificial Sequence
  13G4.2F8 heavy chain DNA sequence
caggtccagctgcagcagcctggggctgagctggtaaagcctggggcttcagtgaagttgtcctgcaaggcttctggctacactttcaccagctactggatgcactgggtgaagcagaggcctggacaaggccttgagtggattggaatgattcatcctaacagtggtagtactgactacaatgagaagttcaagaacaaggccacactgaatgtagacaaatcctccagtacagcctacatacaactcagcagcctgacatctgaggactctgcggtctattactgtacaagatgggggatttattactacgcgagggactactggggccaaggcaccactctcacagtctcctcagctagcaccaagggccccagcgtgtttcctctcgctccctgcagccggagcacatccgagagcaccgctgctctgggctgtctcgtgaaggactacttccctgaacccgtcaccgtcagctggaatagcggcgccctgacatccggcgtccacacattccccgctgtcctgcagagcagcggcctgtacagcctgagctccgtggtcaccgtgcctagcagcagcctgggaacaaagacctacacctgcaacgtggaccataagccctccaacaccaaggtggacaagcgggtggaatccaagtatggacccccctgtcctccttgccctgctcctgaatttctcggaggcccctccgtcttcctgtttccccccaagcccaaggacaccctgatgatctcccggacacccgaagtcacctgcgtcgtggtggatgtcagccaggaagatcccgaggtgcagttcaactggtacgtggacggagtggaggtgcataacgccaaaaccaagcccagggaagagcagttcaacagcacctatcgggtcgtgtccgtgctcaccgtcctgcatcaggattggctcaacggcaaggagtacaagtgcaaggtgtccaacaagggcctgccctcctccatcgagaagaccatctccaaggctaagggccaacctcgggagccccaagtgtataccctccctcccagccaggaggagatgaccaagaatcaagtgagcctgacctgcctcgtgaagggattttacccctccgacatcgctgtggaatgggaaagcaatggccaacctgagaacaactacaagaccacaccccccgtgctggactccgatggctccttcttcctgtacagcaggctgaccgtggacaaatcccggtggcaagagggaaacgtgttcagctgctccgtgatgcacgaggctctccacaaccactacacccagaagagcctctccctgagcctcggctagtaa

SEQ ID NO: 725 - DNA, 1335 bp, Artificial Sequence
  13H12.2F8 heavy chain DNA sequence
cagatccagctggtccaatcaggacccgaactgaaaaaaccaggcgagacagtcaaaatcagctgtaaggcctcaggctacactttcacaacctacgggatgtcatgggtaaagcaagctcctggcaaggggctgaaatggatgggttggatcaacacatactctggagtgcccacctacgctgacgactttaagggtagattcgcatttagcctggaaacaagtgccagtacagcctacctccagataaacaacttgaaaaacgaggataccgcaacctatttttgcgccgtcccctacgagtacgacggtgcctattggggtcagggtacactcgtaacagtttccgccgctagcaccaagggccccagcgtgtttcctctcgctccctgcagccggagcacatccgagagcaccgctgctctgggctgtctcgtgaaggactacttccctgaacccgtcaccgtcagctggaatagcggcgccctgacatccggcgtccacacattccccgctgtcctgcagagcagcggcctgtacagcctgagctccgtggtcaccgtgcctagcagcagcctgggaacaaagacctacacctgcaacgtggaccataagccctccaacaccaaggtggacaagcgggtggaatccaagtatggacccccctgtcctccttgccctgctcctgaatttctcggaggcccctccgtcttcctgtttccccccaagcccaaggacaccctgatgatctcccggacacccgaagtcacctgcgtcgtggtggatgtcagccaggaagatcccgaggtgcagttcaactggtacgtggacggagtggaggtgcataacgccaaaaccaagcccagggaagagcagttcaacagcacctatcgggtcgtgtccgtgctcaccgtcctgcatcaggattggctcaacggcaaggagtacaagtgcaaggtgtccaacaagggcctgccctcctccatcgagaagaccatctccaaggctaagggccaacctcgggagccccaagtgtataccctccctcccagccaggaggagatgaccaagaatcaagtgagcctgacctgcctcgtgaagggattttacccctccgacatcgctgtggaatgggaaagcaatggccaacctgagaacaactacaagaccacaccccccgtgctggactccgatggctccttcttcctgtacagcaggctgaccgtggacaaatcccggtggcaagagggaaacgtgttcagctgctccgtgatgcacgaggctctccacaaccactacacccagaagagcctctccctgagcctcggctagtaa

SEQ ID NO: 726 - DNA, 1329 bp, Artificial Sequence
  15G7.2A7 heavy chain DNA sequence
gaggtccagctgcaacaatctggacctgagctggtgaagcctggggcttcagtgaagatatcctgtaaggcttctggatacacgttcactgactactacatgaactgggtgaagcagagccatggaaagagccttgagtggattggagatattaatcctaacaatggtggtactaactacaaccagaagttcaagggcaaggccacattgactgtagacaagtcctccagcacagcctacatggagctccgcagcctgacatctgaggactctgcagtctattactgcacctcaggctacgggtttccttactggggccaggggactctggtcactgtctctgcagctagcaccaagggccccagcgtgtttcctctcgctccctgcagccggagcacatccgagagcaccgctgctctgggctgtctcgtgaaggactacttccctgaacccgtcaccgtcagctggaatagcggcgccctgacatccggcgtccacacattccccgctgtcctgcagagcagcggcctgtacagcctgagctccgtggtcaccgtgcctagcagcagcctgggaacaaagacctacacctgcaacgtggaccataagccctccaacaccaaggtggacaagcgggtggaatccaagtatggacccccctgtcctccttgccctgctcctgaatttctcggaggcccctccgtcttcctgtttccccccaagcccaaggacaccctgatgatctcccggacacccgaagtcacctgcgtcgtggtggatgtcagccaggaagatcccgaggtgcagttcaactggtacgtggacggagtggaggtgcataacgccaaaaccaagcccagggaagagcagttcaacagcacctatcgggtcgtgtccgtgctcaccgtcctgcatcaggattggctcaacggcaaggagtacaagtgcaaggtgtccaacaagggcctgccctcctccatcgagaagaccatctccaaggctaagggccaacctcgggagccccaagtgtataccctccctcccagccaggaggagatgaccaagaatcaagtgagcctgacctgcctcgtgaagggattttacccctccgacatcgctgtggaatgggaaagcaatggccaacctgagaacaactacaagaccacaccccccgtgctggactccgatggctccttcttcctgtacagcaggctgaccgtggacaaatcccggtggcaagagggaaacgtgttcagctgctccgtgatgcacgaggctctccacaaccactacacccagaagagcctctccctgagcctcggctagtaa

SEQ ID NO: 727 - DNA, 1335 bp, Artificial Sequence
  19D9.2E5 heavy chain DNA sequence
cagatccagttggtacagtctggacctgagctgaagaagcctggagagacagtcaagatctcctgcaaggcttctggatataccttcacaacctatggaatgggctgggtgaaacaggctccaggaaagggtttgaagtggatgggctggataaacacctactctggcgtgccaacatatgctgatgacttcaagggacggtttgccttctctttggaaacctctaccagcactgcctatttgcagatcaacaacctcaaaaatgaggacatggctacatatttctgtgcaaccccttatgaatacgacggggcttactggggccaagggactctggtcactgtctctgcagctagcaccaagggccccagcgtgtttcctctcgctccctgcagccggagcacatccgagagcaccgctgctctgggctgtctcgtgaaggactacttccctgaacccgtcaccgtcagctggaatagcggcgccctgacatccggcgtccacacattccccgctgtcctgcagagcagcggcctgtacagcctgagctccgtggtcaccgtgcctagcagcagcctgggaacaaagacctacacctgcaacgtggaccataagccctccaacaccaaggtggacaagcgggtggaatccaagtatggacccccctgtcctccttgccctgctcctgaatttctcggaggcccctccgtcttcctgtttccccccaagcccaaggacaccctgatgatctcccggacacccgaagtcacctgcgtcgtggtggatgtcagccaggaagatcccgaggtgcagttcaactggtacgtggacggagtggaggtgcataacgccaaaaccaagcccagggaagagcagttcaacagcacctatcgggtcgtgtccgtgctcaccgtcctgcatcaggattggctcaacggcaaggagtacaagtgcaaggtgtccaacaagggcctgccctcctccatcgagaagaccatctccaaggctaagggccaacctcgggagccccaagtgtataccctccctcccagccaggaggagatgaccaagaatcaagtgagcctgacctgcctcgtgaagggattttacccctccgacatcgctgtggaatgggaaagcaatggccaacctgagaacaactacaagaccacaccccccgtgctggactccgatggctccttcttcctgtacagcaggctgaccgtggacaaatcccggtggcaagagggaaacgtgttcagctgctccgtgatgcacgaggctctccacaaccactacacccagaagagcctctccctgagcctcggctagtaa

SEQ ID NO: 728 - DNA, 1320 bp, Artificial Sequence
  23B10.2B12 heavy chain DNA sequence
caggtccagctgcagcagtctggacctgaactggtgaagcctggggattctgtgaagatatcctgcaaggctgctggctacaccttcagtgactattatataaactgggtgaagcagaggcctggacagggacttgagtggattggatggatttatcctgtaagcgttaatactaagtacaatgagaagttcaagggcaaggccacattgactgtagacacatcctccagcacagcctacatgcagctcagcagcctgacctctgaggactctggggtctatttctgtgcctaccttgattattggggccaagggactctggtcactgtctctgcagctagcaccaagggccccagcgtgtttcctctcgctccctgcagccggagcacatccgagagcaccgctgctctgggctgtctcgtgaaggactacttccctgaacccgtcaccgtcagctggaatagcggcgccctgacatccggcgtccacacattccccgctgtcctgcagagcagcggcctgtacagcctgagctccgtggtcaccgtgcctagcagcagcctgggaacaaagacctacacctgcaacgtggaccataagccctccaacaccaaggtggacaagcgggtggaatccaagtatggacccccctgtcctccttgccctgctcctgaatttctcggaggcccctccgtcttcctgtttccccccaagcccaaggacaccctgatgatctcccggacacccgaagtcacctgcgtcgtggtggatgtcagccaggaagatcccgaggtgcagttcaactggtacgtggacggagtggaggtgcataacgccaaaaccaagcccagggaagagcagttcaacagcacctatcgggtcgtgtccgtgctcaccgtcctgcatcaggattggctcaacggcaaggagtacaagtgcaaggtgtccaacaagggcctgccctcctccatcgagaagaccatctccaaggctaagggccaacctcgggagccccaagtgtataccctccctcccagccaggaggagatgaccaagaatcaagtgagcctgacctgcctcgtgaagggattttacccctccgacatcgctgtggaatgggaaagcaatggccaacctgagaacaactacaagaccacaccccccgtgctggactccgatggctccttcttcctgtacagcaggctgaccgtggacaaatcccggtggcaagagggaaacgtgttcagctgctccgtgatgcacgaggctctccacaaccactacacccagaagagcctctccctgagcctcggctagtaa

SEQ ID NO: 729 - DNA, 1344 bp, Artificial Sequence
  24D12.2H9 heavy chain DNA sequence
caggtgcagctgaagcagtcaggacctggcctagtgcagccctcacagagcctgtccatcacctgcacagtctctggtttctcattaactagctatggtgtacactgggttcgccaggctccaggaaagggtctggaatggctgggagtgatatggagtggtggaagcacagactataatgctgctttcatgtccagactgagcatcagcaaggacaactccaagagccaagttttctttaaaatgaacagtctgcaagctgatgacactgccatatactactgtgccaaaagccctgatggttacgacgtcgcctggtttggttactggggccaagggactctggtcactgtctctgcagctagcaccaagggccccagcgtgtttcctctcgctccctgcagccggagcacatccgagagcaccgctgctctgggctgtctcgtgaaggactacttccctgaacccgtcaccgtcagctggaatagcggcgccctgacatccggcgtccacacattccccgctgtcctgcagagcagcggcctgtacagcctgagctccgtggtcaccgtgcctagcagcagcctgggaacaaagacctacacctgcaacgtggaccataagccctccaacaccaaggtggacaagcgggtggaatccaagtatggacccccctgtcctccttgccctgctcctgaatttctcggaggcccctccgtcttcctgtttccccccaagcccaaggacaccctgatgatctcccggacacccgaagtcacctgcgtcgtggtggatgtcagccaggaagatcccgaggtgcagttcaactggtacgtggacggagtggaggtgcataacgccaaaaccaagcccagggaagagcagttcaacagcacctatcgggtcgtgtccgtgctcaccgtcctgcatcaggattggctcaacggcaaggagtacaagtgcaaggtgtccaacaagggcctgccctcctccatcgagaagaccatctccaaggctaagggccaacctcgggagccccaagtgtataccctccctcccagccaggaggagatgaccaagaatcaagtgagcctgacctgcctcgtgaagggattttacccctccgacatcgctgtggaatgggaaagcaatggccaacctgagaacaactacaagaccacaccccccgtgctggactccgatggctccttcttcctgtacagcaggctgaccgtggacaaatcccggtggcaagagggaaacgtgttcagctgctccgtgatgcacgaggctctccacaaccactacacccagaagagcctctccctgagcctcggctagtaa

SEQ ID NO: 730 - DNA, 1350 bp, Artificial Sequence
  F846C.1B2 heavy chain DNA sequence
cagatccagttggtgcagtctggacctgagctgaagaagcctggagagacagtcaagatctcctgcaaggcttctgggtataccttcacaaactatggaatgaattgggtgaagcaggctccaggaaagggtttaaagtggatgggctggataaacacctacactggagagccatcatatgctgatgacttcaagggacggtttgccttctctttggaaacctctgccagcactgcctatttgcagatcaacaacctcaaaaatgaggacatggctacatatttctgtgcaagatgggggggttacgctggggattactatgctatggacttctggggtcaaggaacctcagtcaccgtctcctcagctagcaccaagggccccagcgtgtttcctctcgctccctgcagccggagcacatccgagagcaccgctgctctgggctgtctcgtgaaggactacttccctgaacccgtcaccgtcagctggaatagcggcgccctgacatccggcgtccacacattccccgctgtcctgcagagcagcggcctgtacagcctgagctccgtggtcaccgtgcctagcagcagcctgggaacaaagacctacacctgcaacgtggaccataagccctccaacaccaaggtggacaagcgggtggaatccaagtatggacccccctgtcctccttgccctgctcctgaatttctcggaggcccctccgtcttcctgtttccccccaagcccaaggacaccctgatgatctcccggacacccgaagtcacctgcgtcgtggtggatgtcagccaggaagatcccgaggtgcagttcaactggtacgtggacggagtggaggtgcataacgccaaaaccaagcccagggaagagcagttcaacagcacctatcgggtcgtgtccgtgctcaccgtcctgcatcaggattggctcaacggcaaggagtacaagtgcaaggtgtccaacaagggcctgccctcctccatcgagaagaccatctccaaggctaagggccaacctcgggagccccaagtgtataccctccctcccagccaggaggagatgaccaagaatcaagtgagcctgacctgcctcgtgaagggattttacccctccgacatcgctgtggaatgggaaagcaatggccaacctgagaacaactacaagaccacaccccccgtgctggactccgatggctccttcttcctgtacagcaggctgaccgtggacaaatcccggtggcaagagggaaacgtgttcagctgctccgtgatgcacgaggctctccacaaccactacacccagaagagcctctccctgagcctcggctagtaa

SEQ ID NO: 731 - DNA, 1350 bp, Artificial Sequence
  F846C.1F5 heavy chain DNA sequence
cagatccagttggtgcagtctggacctgagctgaagaagcctggagagacagtcaagatctcctgcaaggcttctgggtataccttcacaaactatggaatgaactgggtgaagcaggctccaggaaagggtttaaagtggatgggctggataaacacctacactggagagccatcatatgctgatgacttcaagggacggtttgccttctctttggaaacctctgccagcactgcctatttgcagatcaacaacctcaaaaatgaggacatggctacatatttctgtgcaagatgggggggttacgatggggattactatgctatggactactggggtcaaggaacctcagtcaccgtctcctcagctagcaccaagggccccagcgtgtttcctctcgctccctgcagccggagcacatccgagagcaccgctgctctgggctgtctcgtgaaggactacttccctgaacccgtcaccgtcagctggaatagcggcgccctgacatccggcgtccacacattccccgctgtcctgcagagcagcggcctgtacagcctgagctccgtggtcaccgtgcctagcagcagcctgggaacaaagacctacacctgcaacgtggaccataagccctccaacaccaaggtggacaagcgggtggaatccaagtatggacccccctgtcctccttgccctgctcctgaatttctcggaggcccctccgtcttcctgtttccccccaagcccaaggacaccctgatgatctcccggacacccgaagtcacctgcgtcgtggtggatgtcagccaggaagatcccgaggtgcagttcaactggtacgtggacggagtggaggtgcataacgccaaaaccaagcccagggaagagcagttcaacagcacctatcgggtcgtgtccgtgctcaccgtcctgcatcaggattggctcaacggcaaggagtacaagtgcaaggtgtccaacaagggcctgccctcctccatcgagaagaccatctccaaggctaagggccaacctcgggagccccaagtgtataccctccctcccagccaggaggagatgaccaagaatcaagtgagcctgacctgcctcgtgaagggattttacccctccgacatcgctgtggaatgggaaagcaatggccaacctgagaacaactacaagaccacaccccccgtgctggactccgatggctccttcttcctgtacagcaggctgaccgtggacaaatcccggtggcaagagggaaacgtgttcagctgctccgtgatgcacgaggctctccacaaccactacacccagaagagcctctccctgagcctcggctagtaa

SEQ ID NO: 732 - DNA, 1350 bp, Artificial Sequence
  F846C.1H12 heavy chain DNA sequence
cagatccagttggtgcagtctggacctgagctgaagaagcctggagagacagtcaagatctcctgcaaggcttctgggtataccttcacaaactttggaatgaactgggtgaagcaggctccaggaaagggtttaaagtggatgggctggataaacacctacactggagagccatcatatgctgatgacttcaagggacggtttgccttctctttggaaacctctgccagcactgcctatttgcagatcaacaacctcaaaaatgaggacattgctacatatttctgtgcaagatgggggggttacgctggggattactatgctatggactactggggtcaaggaacctcagtcaccgtctcctcagctagcaccaagggccccagcgtgtttcctctcgctccctgcagccggagcacatccgagagcaccgctgctctgggctgtctcgtgaaggactacttccctgaacccgtcaccgtcagctggaatagcggcgccctgacatccggcgtccacacattccccgctgtcctgcagagcagcggcctgtacagcctgagctccgtggtcaccgtgcctagcagcagcctgggaacaaagacctacacctgcaacgtggaccataagccctccaacaccaaggtggacaagcgggtggaatccaagtatggacccccctgtcctccttgccctgctcctgaatttctcggaggcccctccgtcttcctgtttccccccaagcccaaggacaccctgatgatctcccggacacccgaagtcacctgcgtcgtggtggatgtcagccaggaagatcccgaggtgcagttcaactggtacgtggacggagtggaggtgcataacgccaaaaccaagcccagggaagagcagttcaacagcacctatcgggtcgtgtccgtgctcaccgtcctgcatcaggattggctcaacggcaaggagtacaagtgcaaggtgtccaacaagggcctgccctcctccatcgagaagaccatctccaaggctaagggccaacctcgggagccccaagtgtataccctccctcccagccaggaggagatgaccaagaatcaagtgagcctgacctgcctcgtgaagggattttacccctccgacatcgctgtggaatgggaaagcaatggccaacctgagaacaactacaagaccacaccccccgtgctggactccgatggctccttcttcctgtacagcaggctgaccgtggacaaatcccggtggcaagagggaaacgtgttcagctgctccgtgatgcacgaggctctccacaaccactacacccagaagagcctctccctgagcctcggctagtaa

SEQ ID NO: 733 - DNA, 1332 bp, Artificial Sequence
  F846C.1H5 heavy chain DNA sequence
gaggtccagctgttggagtctgggggaggcttagtgaagcctggagggtccctgaaactctcctgtgcagcctctggattcactttcagcagctatgccatgtcttgggttcgccagactccagagaagaggctggagtgggtcgcatccattagtagtggtggtgacacctactatccagacagtgtgaagggccgattcaccatctctagagataatgccaggaacatcctgtacctgcaaatgagcagtctgaggtctgaggacacggccatgtattactgtgcaagttatggtaactccctctttgactactggggccaaggcaccactctcacagtctcctcagctagcaccaagggccccagcgtgtttcctctcgctccctgcagccggagcacatccgagagcaccgctgctctgggctgtctcgtgaaggactacttccctgaacccgtcaccgtcagctggaatagcggcgccctgacatccggcgtccacacattccccgctgtcctgcagagcagcggcctgtacagcctgagctccgtggtcaccgtgcctagcagcagcctgggaacaaagacctacacctgcaacgtggaccataagccctccaacaccaaggtggacaagcgggtggaatccaagtatggacccccctgtcctccttgccctgctcctgaatttctcggaggcccctccgtcttcctgtttccccccaagcccaaggacaccctgatgatctcccggacacccgaagtcacctgcgtcgtggtggatgtcagccaggaagatcccgaggtgcagttcaactggtacgtggacggagtggaggtgcataacgccaaaaccaagcccagggaagagcagttcaacagcacctatcgggtcgtgtccgtgctcaccgtcctgcatcaggattggctcaacggcaaggagtacaagtgcaaggtgtccaacaagggcctgccctcctccatcgagaagaccatctccaaggctaagggccaacctcgggagccccaagtgtataccctccctcccagccaggaggagatgaccaagaatcaagtgagcctgacctgcctcgtgaagggattttacccctccgacatcgctgtggaatgggaaagcaatggccaacctgagaacaactacaagaccacaccccccgtgctggactccgatggctccttcttcctgtacagcaggctgaccgtggacaaatcccggtggcaagagggaaacgtgttcagctgctccgtgatgcacgaggctctccacaaccactacacccagaagagcctctccctgagcctcggctagtaa

SEQ ID NO: 734 - DNA, 1350 bp, Artificial Sequence; identical to SEQ ID NO: 731
  F846C.2H3 heavy chain DNA sequence

SEQ ID NO: 735 - DNA, 1326 bp, Artificial Sequence
  F846TC.14A2 heavy chain DNA sequence
cagatccagttggtgcagtctggacctgagctgaagaagcctggagagacagtcaagatctcctgcaaggcttctgggtataccttcacaaactatggaatgaactgggtgaagcaggctccaggaaagggtttaaagtggatgggctggataaacacctacactggagagccaacatatgctggtgacctcaagggacggtttgccttctctttggaaacctctgccagcactgcctatttgcagatcaacaacctcaaaaatgaggacacggctacatatttctgtgtaagatatactatggactactggggtcaaggaacctcagtcaccgtctcctcagctagcaccaagggccccagcgtgtttcctctcgctccctgcagccggagcacatccgagagcaccgctgctctgggctgtctcgtgaaggactacttccctgaacccgtcaccgtcagctggaatagcggcgccctgacatccggcgtccacacattccccgctgtcctgcagagcagcggcctgtacagcctgagctccgtggtcaccgtgcctagcagcagcctgggaacaaagacctacacctgcaacgtggaccataagccctccaacaccaaggtggacaagcgggtggaatccaagtatggacccccctgtcctccttgccctgctcctgaatttctcggaggcccctccgtcttcctgtttccccccaagcccaaggacaccctgatgatctcccggacacccgaagtcacctgcgtcgtggtggatgtcagccaggaagatcccgaggtgcagttcaactggtacgtggacggagtggaggtgcataacgccaaaaccaagcccagggaagagcagttcaacagcacctatcgggtcgtgtccgtgctcaccgtcctgcatcaggattggctcaacggcaaggagtacaagtgcaaggtgtccaacaagggcctgccctcctccatcgagaagaccatctccaaggctaagggccaacctcgggagccccaagtgtataccctccctcccagccaggaggagatgaccaagaatcaagtgagcctgacctgcctcgtgaagggattttacccctccgacatcgctgtggaatgggaaagcaatggccaacctgagaacaactacaagaccacaccccccgtgctggactccgatggctccttcttcctgtacagcaggctgaccgtggacaaatcccggtggcaagagggaaacgtgttcagctgctccgtgatgcacgaggctctccacaaccactacacccagaagagcctctccctgagcctcggctagtaa

SEQ ID NO: 736 - DNA, 1356 bp, Artificial Sequence
  F846TC.14E4 heavy chain DNA sequence
caggttactctgaaagagtctggccctgggatattgcagccctcccagaccctcagtctgacttgttctttctctgggttttcactgagcacttctggtatgggtgtaggctggattcgtcagccttcagggaagggtctggagtggctggcacacatttggtgggatgatgataagtactataacacagccctgaagagcgggctcacaatctccaaggatgcctccaaaaaccaggtcttcctcaagatcgccagtatggacactgcagatactgccacatactactgtgctcgaaacctctatgatggttcctacgggtactatgctatggactactggggtcaaggaacctcagtcaccgtctcctcagctagcaccaagggccccagcgtgtttcctctcgctccctgcagccggagcacatccgagagcaccgctgctctgggctgtctcgtgaaggactacttccctgaacccgtcaccgtcagctggaatagcggcgccctgacatccggcgtccacacattccccgctgtcctgcagagcagcggcctgtacagcctgagctccgtggtcaccgtgcctagcagcagcctgggaacaaagacctacacctgcaacgtggaccataagccctccaacaccaaggtggacaagcgggtggaatccaagtatggacccccctgtcctccttgccctgctcctgaatttctcggaggcccctccgtcttcctgtttccccccaagcccaaggacaccctgatgatctcccggacacccgaagtcacctgcgtcgtggtggatgtcagccaggaagatcccgaggtgcagttcaactggtacgtggacggagtggaggtgcataacgccaaaaccaagcccagggaagagcagttcaacagcacctatcgggtcgtgtccgtgctcaccgtcctgcatcaggattggctcaacggcaaggagtacaagtgcaaggtgtccaacaagggcctgccctcctccatcgagaagaccatctccaaggctaagggccaacctcgggagccccaagtgtataccctccctcccagccaggaggagatgaccaagaatcaagtgagcctgacctgcctcgtgaagggattttacccctccgacatcgctgtggaatgggaaagcaatggccaacctgagaacaactacaagaccacaccccccgtgctggactccgatggctccttcttcctgtacagcaggctgaccgtggacaaatcccggtggcaagagggaaacgtgttcagctgctccgtgatgcacgaggctctccacaaccactacacccagaagagcctctccctgagcctcggctagtaa

SEQ ID NO: 737 - DNA, 1350 bp, Artificial Sequence
  F846TC.16B5 heavy chain DNA sequence
cagatccagttggtgcagtctggacctgagctgaagaagcctggagagacagtcaagatctcctgcaaggcttctgggtataccttcacaaactatggaatgaactgggtgaagcaggctccaggaaagggtttaaagtggatgggctggataaacacctacactggagagccagcatatgctgatgacttcaagggacggtttgccttctctttggaaacctctgccagcactgcctatttgcagatcaacaacctcaaaaatgaggacatggctacatatttctgtgcaagatgggggggttacgatggggattactatgctatggactactggggtcaaggaacctcagtcaccgtctcctcagctagcaccaagggccccagcgtgtttcctctcgctccctgcagccggagcacatccgagagcaccgctgctctgggctgtctcgtgaaggactacttccctgaacccgtcaccgtcagctggaatagcggcgccctgacatccggcgtccacacattccccgctgtcctgcagagcagcggcctgtacagcctgagctccgtggtcaccgtgcctagcagcagcctgggaacaaagacctacacctgcaacgtggaccataagccctccaacaccaaggtggacaagcgggtggaatccaagtatggacccccctgtcctccttgccctgctcctgaatttctcggaggcccctccgtcttcctgtttccccccaagcccaaggacaccctgatgatctcccggacacccgaagtcacctgcgtcgtggtggatgtcagccaggaagatcccgaggtgcagttcaactggtacgtggacggagtggaggtgcataacgccaaaaccaagcccagggaagagcagttcaacagcacctatcgggtcgtgtccgtgctcaccgtcctgcatcaggattggctcaacggcaaggagtacaagtgcaaggtgtccaacaagggcctgccctcctccatcgagaagaccatctccaaggctaagggccaacctcgggagccccaagtgtataccctccctcccagccaggaggagatgaccaagaatcaagtgagcctgacctgcctcgtgaagggattttacccctccgacatcgctgtggaatgggaaagcaatggccaacctgagaacaactacaagaccacaccccccgtgctggactccgatggctccttcttcctgtacagcaggctgaccgtggacaaatcccggtggcaagagggaaacgtgttcagctgctccgtgatgcacgaggctctccacaaccactacacccagaagagcctctccctgagcctcggctagtaa

SEQ ID NO: 738 - DNA, 1353 bp, Artificial Sequence
  F846TC.7F10 heavy chain DNA sequence
gaagtgcagctggtggagtctgggggagacttagtgaagcctggagggtccctgaaactctcctgtgcagcctctggattcactttcagtaactatggcttgtcttggattcgccagactccagacaagaggctggagtgggtcgcaaccattagtagtggtggtagttacacctactatcctgacagtgtgaaggggcgattcaccatctccagagacagtgccaagaacaccctgtacctgcaaatgagcagtctgaagtctgaggacacagccatgtattactgtgcaagacatgcgcattactacggtgttagcccgtactactttgactactggggccaaggcacctgtctcacagtctcctcagctagcaccaagggccccagcgtgtttcctctcgctccctgcagccggagcacatccgagagcaccgctgctctgggctgtctcgtgaaggactacttccctgaacccgtcaccgtcagctggaatagcggcgccctgacatccggcgtccacacattccccgctgtcctgcagagcagcggcctgtacagcctgagctccgtggtcaccgtgcctagcagcagcctgggaacaaagacctacacctgcaacgtggaccataagccctccaacaccaaggtggacaagcgggtggaatccaagtatggacccccctgtcctccttgccctgctcctgaatttctcggaggcccctccgtcttcctgtttccccccaagcccaaggacaccctgatgatctcccggacacccgaagtcacctgcgtcgtggtggatgtcagccaggaagatcccgaggtgcagttcaactggtacgtggacggagtggaggtgcataacgccaaaaccaagcccagggaagagcagttcaacagcacctatcgggtcgtgtccgtgctcaccgtcctgcatcaggattggctcaacggcaaggagtacaagtgcaaggtgtccaacaagggcctgccctcctccatcgagaagaccatctccaaggctaagggccaacctcgggagccccaagtgtataccctccctcccagccaggaggagatgaccaagaatcaagtgagcctgacctgcctcgtgaagggattttacccctccgacatcgctgtggaatgggaaagcaatggccaacctgagaacaactacaagaccacaccccccgtgctggactccgatggctccttcttcctgtacagcaggctgaccgtggacaaatcccggtggcaagagggaaacgtgttcagctgctccgtgatgcacgaggctctccacaaccactacacccagaagagcctctccctgagcctcggctagtaa

SEQ ID NO: 739 - DNA, 1341 bp, Artificial Sequence
  F847C.10B9 heavy chain DNA sequence
cagatccagttggtgcagtctggacctgaggtgaagaagcctggagagacagtcaagatctcctgcaaggcttctgggtatatcttcacaaactatggaatgaactgggtgaagcaggctccaggaaagggtttaaagtggatgggctggataaacacctacactggagagccaacatatactgatgacttcaagggacggtttgccttctctttggaaacctctgccagcactgcctatttgcagatcaacaacctcaaaaatgaggacacggctacatatttctgtgcaaagtttggtaactacgtgggagctatggactactggggtcaaggaacctcagtcaccgtctcctcagctagcaccaagggccccagcgtgtttcctctcgctccctgcagccggagcacatccgagagcaccgctgctctgggctgtctcgtgaaggactacttccctgaacccgtcaccgtcagctggaatagcggcgccctgacatccggcgtccacacattccccgctgtcctgcagagcagcggcctgtacagcctgagctccgtggtcaccgtgcctagcagcagcctgggaacaaagacctacacctgcaacgtggaccataagccctccaacaccaaggtggacaagcgggtggaatccaagtatggacccccctgtcctccttgccctgctcctgaatttctcggaggcccctccgtcttcctgtttccccccaagcccaaggacaccctgatgatctcccggacacccgaagtcacctgcgtcgtggtggatgtcagccaggaagatcccgaggtgcagttcaactggtacgtggacggagtggaggtgcataacgccaaaaccaagcccagggaagagcagttcaacagcacctatcgggtcgtgtccgtgctcaccgtcctgcatcaggattggctcaacggcaaggagtacaagtgcaaggtgtccaacaagggcctgccctcctccatcgagaagaccatctccaaggctaagggccaacctcgggagccccaagtgtataccctccctcccagccaggaggagatgaccaagaatcaagtgagcctgacctgcctcgtgaagggattttacccctccgacatcgctgtggaatgggaaagcaatggccaacctgagaacaactacaagaccacaccccccgtgctggactccgatggctccttcttcctgtacagcaggctgaccgtggacaaatcccggtggcaagagggaaacgtgttcagctgctccgtgatgcacgaggctctccacaaccactacacccagaagagcctctccctgagcctcggctagtaa

SEQ ID NO: 740 - DNA, 1344 bp, Artificial Sequence
  F847C.11B1 heavy chain DNA sequence
gaggtccagcttcagcagtctggacctgagctggtgaaacctggggcctcagtgaagatatcctgcaaggcttctggaaacacattcactgaccacaacatgcactgggtgaagcagagccatggaaagagccttgagtggattggatatatttatccttacaatggtggtactggctacaaccagaagttcaagagcaaggccacattgactgtagacaattcctccagcacagtctacatggagctccgcagcctgacatctgaggactctgcagtctattactgtgcaagaggggagtatgattacctggcctggtttgcttactggggccaagggactctggtcactgtctctgcagctagcaccaagggccccagcgtgtttcctctcgctccctgcagccggagcacatccgagagcaccgctgctctgggctgtctcgtgaaggactacttccctgaacccgtcaccgtcagctggaatagcggcgccctgacatccggcgtccacacattccccgctgtcctgcagagcagcggcctgtacagcctgagctccgtggtcaccgtgcctagcagcagcctgggaacaaagacctacacctgcaacgtggaccataagccctccaacaccaaggtggacaagcgggtggaatccaagtatggacccccctgtcctccttgccctgctcctgaatttctcggaggcccctccgtcttcctgtttccccccaagcccaaggacaccctgatgatctcccggacacccgaagtcacctgcgtcgtggtggatgtcagccaggaagatcccgaggtgcagttcaactggtacgtggacggagtggaggtgcataacgccaaaaccaagcccagggaagagcagttcaacagcacctatcgggtcgtgtccgtgctcaccgtcctgcatcaggattggctcaacggcaaggagtacaagtgcaaggtgtccaacaagggcctgccctcctccatcgagaagaccatctccaaggctaagggccaacctcgggagccccaagtgtataccctccctcccagccaggaggagatgaccaagaatcaagtgagcctgacctgcctcgtgaagggattttacccctccgacatcgctgtggaatgggaaagcaatggccaacctgagaacaactacaagaccacaccccccgtgctggactccgatggctccttcttcctgtacagcaggctgaccgtggacaaatcccggtggcaagagggaaacgtgttcagctgctccgtgatgcacgaggctctccacaaccactacacccagaagagcctctccctgagcctcggctagtaa

SEQ ID NO: 741 - DNA, 1341 bp, Artificial Sequence
  F847C.12F12 heavy chain DNA sequence
cagatccagttggtgcagtctggacctgagctgaagaagcctggagagacagtcaagatctcctgcaaggcttctgggtataccttcacaaactatggaatgaactgggtgaagcaggctccaggaaagggtttaaagtggatgggctggataaacacctacactggagagccaacatatgttgatgacttcaagggacggtttgccttctctttggaaacctctgccagcactgcctatttgcggatcaacaacctcaaaaatgaggacacggctacatatttctgtgcaaagtttggtaactacgtgggagctatggactactggggtcaaggaacctcagtcaccgtctcctcagctagcaccaagggccccagcgtgtttcctctcgctccctgcagccggagcacatccgagagcaccgctgctctgggctgtctcgtgaaggactacttccctgaacccgtcaccgtcagctggaatagcggcgccctgacatccggcgtccacacattccccgctgtcctgcagagcagcggcctgtacagcctgagctccgtggtcaccgtgcctagcagcagcctgggaacaaagacctacacctgcaacgtggaccataagccctccaacaccaaggtggacaagcgggtggaatccaagtatggacccccctgtcctccttgccctgctcctgaatttctcggaggcccctccgtcttcctgtttccccccaagcccaaggacaccctgatgatctcccggacacccgaagtcacctgcgtcgtggtggatgtcagccaggaagatcccgaggtgcagttcaactggtacgtggacggagtggaggtgcataacgccaaaaccaagcccagggaagagcagttcaacagcacctatcgggtcgtgtccgtgctcaccgtcctgcatcaggattggctcaacggcaaggagtacaagtgcaaggtgtccaacaagggcctgccctcctccatcgagaagaccatctccaaggctaagggccaacctcgggagccccaagtgtataccctccctcccagccaggaggagatgaccaagaatcaagtgagcctgacctgcctcgtgaagggattttacccctccgacatcgctgtggaatgggaaagcaatggccaacctgagaacaactacaagaccacaccccccgtgctggactccgatggctccttcttcctgtacagcaggctgaccgtggacaaatcccggtggcaagagggaaacgtgttcagctgctccgtgatgcacgaggctctccacaaccactacacccagaagagcctctccctgagcctcggctagtaa

SEQ ID NO: 742 - DNA, 1341 bp, Artificial Sequence; identical to SEQ ID NO: 739
  F847C.26F5 heavy chain DNA sequence

SEQ ID NO: 743 - DNA, 1335 bp, Artificial Sequence
  F847C.4B10 heavy chain DNA sequence
gaggtgcagcttgttgagactgggggaggcttagtgaagcctggagggtccctgaaactctcctgtgcagcctctggattcactttcagtagctatgccatgtcttgggttcgccagactccagagaagaggctggagtgggtcgcatccattagtagtggtggtagcacctactatccagacagtgtgaagggccgattcaccatctccagagataatgccaggaacatcctgtacctgcaaatgagcagtctgaggtctgaggacacggccatgtattactgtacaaggtttactacggtagtagagatggactactggggtcaaggaacctcagtcaccgtctcctcagctagcaccaagggccccagcgtgtttcctctcgctccctgcagccggagcacatccgagagcaccgctgctctgggctgtctcgtgaaggactacttccctgaacccgtcaccgtcagctggaatagcggcgccctgacatccggcgtccacacattccccgctgtcctgcagagcagcggcctgtacagcctgagctccgtggtcaccgtgcctagcagcagcctgggaacaaagacctacacctgcaacgtggaccataagccctccaacaccaaggtggacaagcgggtggaatccaagtatggacccccctgtcctccttgccctgctcctgaatttctcggaggcccctccgtcttcctgtttccccccaagcccaaggacaccctgatgatctcccggacacccgaagtcacctgcgtcgtggtggatgtcagccaggaagatcccgaggtgcagttcaactggtacgtggacggagtggaggtgcataacgccaaaaccaagcccagggaagagcagttcaacagcacctatcgggtcgtgtccgtgctcaccgtcctgcatcaggattggctcaacggcaaggagtacaagtgcaaggtgtccaacaagggcctgccctcctccatcgagaagaccatctccaaggctaagggccaacctcgggagccccaagtgtataccctccctcccagccaggaggagatgaccaagaatcaagtgagcctgacctgcctcgtgaagggattttacccctccgacatcgctgtggaatgggaaagcaatggccaacctgagaacaactacaagaccacaccccccgtgctggactccgatggctccttcttcctgtacagcaggctgaccgtggacaaatcccggtggcaagagggaaacgtgttcagctgctccgtgatgcacgaggctctccacaaccactacacccagaagagcctctccctgagcctcggctagtaa

SEQ ID NO: 744 - DNA, 1320 bp, Artificial Sequence
  F849C.8D10 heavy chain DNA sequence
caggtccaactgcagcagactggtgctgagcttgtgaagcctggggcctcagtgaagctgtcctgcaaggcttctggctatactttcaccagctactggataaactgggtgaagcagaggcctggacaaggccttgagtggattggaaacatttatcctggtagtagtagtatttactacagtgagaagttcaagagtaaggccacactgactgtagacacatcctccagcacagcctacatgcagctcagcagcctgacatctgacgactctgcggtctattattgtgcaagatggggctactggggccaaggcaccactctcacagtctcctcagctagcaccaagggccccagcgtgtttcctctcgctccctgcagccggagcacatccgagagcaccgctgctctgggctgtctcgtgaaggactacttccctgaacccgtcaccgtcagctggaatagcggcgccctgacatccggcgtccacacattccccgctgtcctgcagagcagcggcctgtacagcctgagctccgtggtcaccgtgcctagcagcagcctgggaacaaagacctacacctgcaacgtggaccataagccctccaacaccaaggtggacaagcgggtggaatccaagtatggacccccctgtcctccttgccctgctcctgaatttctcggaggcccctccgtcttcctgtttccccccaagcccaaggacaccctgatgatctcccggacacccgaagtcacctgcgtcgtggtggatgtcagccaggaagatcccgaggtgcagttcaactggtacgtggacggagtggaggtgcataacgccaaaaccaagcccagggaagagcagttcaacagcacctatcgggtcgtgtccgtgctcaccgtcctgcatcaggattggctcaacggcaaggagtacaagtgcaaggtgtccaacaagggcctgccctcctccatcgagaagaccatctccaaggctaagggccaacctcgggagccccaagtgtataccctccctcccagccaggaggagatgaccaagaatcaagtgagcctgacctgcctcgtgaagggattttacccctccgacatcgctgtggaatgggaaagcaatggccaacctgagaacaactacaagaccacaccccccgtgctggactccgatggctccttcttcctgtacagcaggctgaccgtggacaaatcccggtggcaagagggaaacgtgttcagctgctccgtgatgcacgaggctctccacaaccactacacccagaagagcctctccctgagcctcggctagtaa

SEQ ID NO: 745 - DNA, 1347 bp, Artificial Sequence
  F849C.8H3 heavy chain DNA sequence
caggttactctgaaagagtctggccctgggatattgcagccctcccagaccctcagtctgacttgttctttctctgggttttcactgagcacttttggtatgggtgtaggctggattcgtcagccttcagggaagggtctggagtggctggcacacatttggtgggatgatgataaacactataacccagccctgaagagccggctcacaatctccaaggatacctccaaaaaccaggtcttcctcaggatcgccaatgtggacactgcagataatgccacatattactgtgctcgaatcgactatggtgactacgtcgggtttgcttattggggccaagggactctggtcactgtctctgcagctagcaccaagggccccagcgtgtttcctctcgctccctgcagccggagcacatccgagagcaccgctgctctgggctgtctcgtgaaggactacttccctgaacccgtcaccgtcagctggaatagcggcgccctgacatccggcgtccacacattccccgctgtcctgcagagcagcggcctgtacagcctgagctccgtggtcaccgtgcctagcagcagcctgggaacaaagacctacacctgcaacgtggaccataagccctccaacaccaaggtggacaagcgggtggaatccaagtatggacccccctgtcctccttgccctgctcctgaatttctcggaggcccctccgtcttcctgtttccccccaagcccaaggacaccctgatgatctcccggacacccgaagtcacctgcgtcgtggtggatgtcagccaggaagatcccgaggtgcagttcaactggtacgtggacggagtggaggtgcataacgccaaaaccaagcccagggaagagcagttcaacagcacctatcgggtcgtgtccgtgctcaccgtcctgcatcaggattggctcaacggcaaggagtacaagtgcaaggtgtccaacaagggcctgccctcctccatcgagaagaccatctccaaggctaagggccaacctcgggagccccaagtgtataccctccctcccagccaggaggagatgaccaagaatcaagtgagcctgacctgcctcgtgaagggattttacccctccgacatcgctgtggaatgggaaagcaatggccaacctgagaacaactacaagaccacaccccccgtgctggactccgatggctccttcttcctgtacagcaggctgaccgtggacaaatcccggtggcaagagggaaacgtgttcagctgctccgtgatgcacgaggctctccacaaccactacacccagaagagcctctccctgagcctcggctagtaa

SEQ ID NO: 746 - DNA, 1338 bp, Artificial Sequence
  846.2B11 heavy chain DNA sequence
caggtccagctacagcagtctggacctgagctggtgaggcctggggctttagtgaagatttcctgcaaggcttctggttacaccttcacaagctacgatataaactgggtgaagcagaggcctggacagggacttgagtggattggatggatttatcctggagatggtagtactaaatataatgagaaattcaagggcaaggccacactgactgcagacaaatcctccagcacagcctacatgcagctcagcagcctgacttctgagaactctgcagtctatttctgtgcaagagaggcggcttctaatgctatggactactggggtcaaggaacctcagtcaccgtctcctcagctagcaccaagggccccagcgtgtttcctctcgctccctgcagccggagcacatccgagagcaccgctgctctgggctgtctcgtgaaggactacttccctgaacccgtcaccgtcagctggaatagcggcgccctgacatccggcgtccacacattccccgctgtcctgcagagcagcggcctgtacagcctgagctccgtggtcaccgtgcctagcagcagcctgggaacaaagacctacacctgcaacgtggaccataagccctccaacaccaaggtggacaagcgggtggaatccaagtatggacccccctgtcctccttgccctgctcctgaatttctcggaggcccctccgtcttcctgtttccccccaagcccaaggacaccctgatgatctcccggacacccgaagtcacctgcgtcgtggtggatgtcagccaggaagatcccgaggtgcagttcaactggtacgtggacggagtggaggtgcataacgccaaaaccaagcccagggaagagcagttcaacagcacctatcgggtcgtgtccgtgctcaccgtcctgcatcaggattggctcaacggcaaggagtacaagtgcaaggtgtccaacaagggcctgccctcctccatcgagaagaccatctccaaggctaagggccaacctcgggagccccaagtgtataccctccctcccagccaggaggagatgaccaagaatcaagtgagcctgacctgcctcgtgaagggattttacccctccgacatcgctgtggaatgggaaagcaatggccaacctgagaacaactacaagaccacaccccccgtgctggactccgatggctccttcttcctgtacagcaggctgaccgtggacaaatcccggtggcaagagggaaacgtgttcagctgctccgtgatgcacgaggctctccacaaccactacacccagaagagcctctccctgagcctcggctagtaa

SEQ ID NO: 747 - DNA, 1350 bp, Artificial Sequence
  846.4D5 heavy chain DNA sequence
gaagtgaagcttgaggagtctggaggaggcttggtgcaacctggaggatccatgaaactctcctgtgttgcctctggattcactttcagtaactactggatgaactgggtccgccagtctccagagaaggggcttgagtgggttgctgaaattagattgaaatctaataattatgcaacacattatgcggagtctgtgaaagggaggttcaccatctcaagagatgattccaaaagtagtgtctacctgcaaatgaacaacttaagagctgaagacactggcatttattactgtaccaggcactacggctttccctactggtacttcgatgtctggggcgcagggaccacggtcaccgtctcctcagctagcaccaagggccccagcgtgtttcctctcgctccctgcagccggagcacatccgagagcaccgctgctctgggctgtctcgtgaaggactacttccctgaacccgtcaccgtcagctggaatagcggcgccctgacatccggcgtccacacattccccgctgtcctgcagagcagcggcctgtacagcctgagctccgtggtcaccgtgcctagcagcagcctgggaacaaagacctacacctgcaacgtggaccataagccctccaacaccaaggtggacaagcgggtggaatccaagtatggacccccctgtcctccttgccctgctcctgaatttctcggaggcccctccgtcttcctgtttccccccaagcccaaggacaccctgatgatctcccggacacccgaagtcacctgcgtcgtggtggatgtcagccaggaagatcccgaggtgcagttcaactggtacgtggacggagtggaggtgcataacgccaaaaccaagcccagggaagagcagttcaacagcacctatcgggtcgtgtccgtgctcaccgtcctgcatcaggattggctcaacggcaaggagtacaagtgcaaggtgtccaacaagggcctgccctcctccatcgagaagaccatctccaaggctaagggccaacctcgggagccccaagtgtataccctccctcccagccaggaggagatgaccaagaatcaagtgagcctgacctgcctcgtgaagggattttacccctccgacatcgctgtggaatgggaaagcaatggccaacctgagaacaactacaagaccacaccccccgtgctggactccgatggctccttcttcctgtacagcaggctgaccgtggacaaatcccggtggcaagagggaaacgtgttcagctgctccgtgatgcacgaggctctccacaaccactacacccagaagagcctctccctgagcctcggctagtaa

SEQ ID NO: 748 - DNA, 1338 bp, Artificial Sequence
  846T.1H2 heavy chain DNA sequence
cagatccagttggtgcagtctggacctgagctgaagaagcctggagagacagtcaagatctcctgcaaggcttctgggtataccttcacaaactatggaatgaactgggtgaagcaggctccaggaaagggtttaaagtggatgggctggataaacaccaacactggagagccaacatatgctgaagagttcaagggacggtttgccttctctttggaaacctctgccagcactgcctatttgcagatcaacaacctcaaaaatgaggacacggctacatatttctgtgcaaccggggggggtaactgggactttgactactggggccaaggcaccactctcacagtctcctcagctagcaccaagggccccagcgtgtttcctctcgctccctgcagccggagcacatccgagagcaccgctgctctgggctgtctcgtgaaggactacttccctgaacccgtcaccgtcagctggaatagcggcgccctgacatccggcgtccacacattccccgctgtcctgcagagcagcggcctgtacagcctgagctccgtggtcaccgtgcctagcagcagcctgggaacaaagacctacacctgcaacgtggaccataagccctccaacaccaaggtggacaagcgggtggaatccaagtatggacccccctgtcctccttgccctgctcctgaatttctcggaggcccctccgtcttcctgtttccccccaagcccaaggacaccctgatgatctcccggacacccgaagtcacctgcgtcgtggtggatgtcagccaggaagatcccgaggtgcagttcaactggtacgtggacggagtggaggtgcataacgccaaaaccaagcccagggaagagcagttcaacagcacctatcgggtcgtgtccgtgctcaccgtcctgcatcaggattggctcaacggcaaggagtacaagtgcaaggtgtccaacaagggcctgccctcctccatcgagaagaccatctccaaggctaagggccaacctcgggagccccaagtgtataccctccctcccagccaggaggagatgaccaagaatcaagtgagcctgacctgcctcgtgaagggattttacccctccgacatcgctgtggaatgggaaagcaatggccaacctgagaacaactacaagaccacaccccccgtgctggactccgatggctccttcttcctgtacagcaggctgaccgtggacaaatcccggtggcaagagggaaacgtgttcagctgctccgtgatgcacgaggctctccacaaccactacacccagaagagcctctccctgagcctcggctagtaa

SEQ ID NO: 749 - DNA, 1326 bp, Artificial Sequence
  847.14H4 heavy chain DNA sequence
cagatccagttggtgcagtctggacctgaactgacgaagcctggagagacagtcaagatctcctgtaaggcttctggctataccttcacagactatggaatgaactgggtgaggcaggctccaggagagactttaaagtggatgggctggataaacacctacactggagagccaacatatgctgatgacttcaaggggcggtttgccttctctttggaatcctctgccagcactgcctatttgcagatcaacaacctcaaaaatgaggacgtggctacatatttctgtgcaagataccctatggactactggggtcaaggaacctcagtcaccgtctcctcagctagcaccaagggccccagcgtgtttcctctcgctccctgcagccggagcacatccgagagcaccgctgctctgggctgtctcgtgaaggactacttccctgaacccgtcaccgtcagctggaatagcggcgccctgacatccggcgtccacacattccccgctgtcctgcagagcagcggcctgtacagcctgagctccgtggtcaccgtgcctagcagcagcctgggaacaaagacctacacctgcaacgtggaccataagccctccaacaccaaggtggacaagcgggtggaatccaagtatggacccccctgtcctccttgccctgctcctgaatttctcggaggcccctccgtcttcctgtttccccccaagcccaaggacaccctgatgatctcccggacacccgaagtcacctgcgtcgtggtggatgtcagccaggaagatcccgaggtgcagttcaactggtacgtggacggagtggaggtgcataacgccaaaaccaagcccagggaagagcagttcaacagcacctatcgggtcgtgtccgtgctcaccgtcctgcatcaggattggctcaacggcaaggagtacaagtgcaaggtgtccaacaagggcctgccctcctccatcgagaagaccatctccaaggctaagggccaacctcgggagccccaagtgtataccctccctcccagccaggaggagatgaccaagaatcaagtgagcctgacctgcctcgtgaagggattttacccctccgacatcgctgtggaatgggaaagcaatggccaacctgagaacaactacaagaccacaccccccgtgctggactccgatggctccttcttcctgtacagcaggctgaccgtggacaaatcccggtggcaagagggaaacgtgttcagctgctccgtgatgcacgaggctctccacaaccactacacccagaagagcctctccctgagcctcggctagtaa

SEQ ID NO: 750 - DNA, 663 bp, Artificial Sequence
  TB001 light chain DNA sequence
gacatcgtgctgacccagtctccactgagcctgcctgttacacctggcgagccagcctccatctcctgcagatcctctaagtccctgctgtacaaggacggcaagacctacctgaactggttcctgcagaagcccggccagtctcctcagctcctgatctacctgatgagcacccatgcctctggcgtgcccgatagattttccggctctggctctggcaccgacttcaccctgaagatctccagagtggaagccgaggacgtgggcgtgtactactgtcagcagctggtggactaccctctgacctttggcggcggaacaaagctggaaatcaagcggacagtggccgctccttccgtgttcatcttcccaccttccgacgagcagctgaagtccggcacagcttctgtcgtgtgcctgctgaacaacttctaccctcgggaagccaaggtgcagtggaaggtggacaatgccctgcagtccggcaactcccaagagtctgtgaccgagcaggactccaaggacagcacctacagcctgtcctccacactgaccctgtccaaggccgactacgagaagcacaaggtgtacgcctgcgaagtgacccatcagggcctgtctagccctgtgaccaagtctttcaaccggggcgagtgctgatga

SEQ ID NO: 751 - DNA, 660 bp, Artificial Sequence
  TB006 light chain DNA sequence
gatatagtgatgacccaaacacctttgtccctgtcagtcaccccaggccaacccgcatctatctcatgcaaatcctcaaaaagtcttttgcactctgacgggataacatatctctactggtatcttcaaaaacctggtcagtccccccagctcttgatctatagaatgagtaaccttgcctctggtgtccccgaccggtttagtggaagcgggtctgggaccgacttcaccctcaagattagtcgcgtcgaagccgaagatgtgggagtgtattactgtgcccagatgctcgaatttcccctgacatttggtcaaggaactaaattggagattaagcggaccgtggccgcccccagcgtgttcatcttccctcccagcgacgagcagctgaagtctggcaccgccagcgtggtgtgcctgctgaacaacttctacccccgcgaggccaaggtgcagtggaaggtggacaacgccctgcagagcggcaacagccaggagagcgtgaccgagcaggactccaaggacagcacctacagcctgagcagcaccctgaccctgagcaaggccgactacgagaagcacaaggtgtacgcctgcgaggtgacccaccagggactgtctagccccgtgaccaagagcttcaaccggggcgagtgctaa

SEQ ID NO: 752 - DNA, 645 bp, Artificial Sequence
  12G5.D7 light chain DNA sequence
gacatcctgatgacccaatctccatcctccatgtctgtatctctgggagacacagtcagcatcacttgccatgcaagtcagggcattaactctaatatggggtggttgcagcagaaaccagggaaatcatttaagggcctgatctatcatgcaaccaacttggaagatggagttccatcaaggttcagtggcagtggatctggagcagattattctctcaccatcagcagcctggaatctgaagattttgcagactattactgtgtacagtatgctcagtttcctcctacgttcggatcggggaccaagctggaaataaaacggaccgtggccgcccccagcgtgttcatcttccctcccagcgacgagcagctgaagtctggcaccgccagcgtggtgtgcctgctgaacaacttctacccccgcgaggccaaggtgcagtggaaggtggacaacgccctgcagagcggcaacagccaggagagcgtgaccgagcaggactccaaggacagcacctacagcctgagcagcaccctgaccctgagcaaggccgactacgagaagcacaaggtgtacgcctgcgaggtgacccaccagggactgtctagccccgtgaccaagagcttcaaccggggcgagtgctaa

SEQ ID NO: 753 - DNA, 660 bp, Artificial Sequence
  13A12.2E5 light chain DNA sequence
gatgttgtgatgacccagactccactcactttgtcggttgccattggacaaccagcttccatctcttgcaagtcgagtcagagcctcttatatactaatggaaaaacctatttgaattggttattacagaggccaggccagtctccaaaacgcctaatctatctgctgtctaaattggactctggagtccctgacaggttcagtgccagtggatcagggacagatttcacactgaaaatcagcagagtggaggctgaggatttgggagtttattactgcttgcagagtacacattttccgctcacgttcggtgctgggaccaagctggagatgaaacggaccgtggccgcccccagcgtgttcatcttccctcccagcgacgagcagctgaagtctggcaccgccagcgtggtgtgcctgctgaacaacttctacccccgcgaggccaaggtgcagtggaaggtggacaacgccctgcagagcggcaacagccaggagagcgtgaccgagcaggactccaaggacagcacctacagcctgagcagcaccctgaccctgagcaaggccgactacgagaagcacaaggtgtacgcctgcgaggtgacccaccagggactgtctagccccgtgaccaagagcttcaaccggggcgagtgctaa

SEQ ID NO: 754 - DNA, 660 bp, Artificial Sequence
  14H10.2C9 light chain DNA sequence
gatgttgtgatgacccagactccactcactttgtcggttaccattggacaaccagcctccatctcttgcaagtcaagtcagagcctcttcgatagtgatggaaagacatatttgaattggttgttacagaggccaggccagtctccaaagcgcctaatctatctggtgtctaaactggactctggagtccctgacaggttcactggcagtggatcagggacagatttcacactgaaaatcagcagagtggaggctgaggatttgggagtttattattgctggcaaggtacacattttcctctcacgttcggtgctgggaccaagctggaaatgaaacggaccgtggccgcccccagcgtgttcatcttccctcccagcgacgagcagctgaagtctggcaccgccagcgtggtgtgcctgctgaacaacttctacccccgcgaggccaaggtgcagtggaaggtggacaacgccctgcagagcggcaacagccaggagagcgtgaccgagcaggactccaaggacagcacctacagcctgagcagcaccctgaccctgagcaaggccgactacgagaagcacaaggtgtacgcctgcgaggtgacccaccagggactgtctagccccgtgaccaagagcttcaaccggggcgagtgctaa

SEQ ID NO: 755 - DNA, 660 bp, Artificial Sequence
  15F10.2D6 light chain DNA sequence
gatgttttgatgacccaaactccactctccctgcctgtcagtcttggagatcaagcctccatctcttgcagatctagtcagagcattgtacataataatggaaacacctatttagaatggtacctgcagaaaccaggccagtctccaaaactcctgatctacaaagtttccaaccgattttctggggtcccagacaggttcagtggcagtggatcagggacagatttcacactcaagatcagcagagtggaggctgaggatctgggagtttattactgctttcaaggttcacatgttccgctcacgttcggtggtgggaccaagttggagctgaaacggaccgtggccgcccccagcgtgttcatcttccctcccagcgacgagcagctgaagtctggcaccgccagcgtggtgtgcctgctgaacaacttctacccccgcgaggccaaggtgcagtggaaggtggacaacgccctgcagagcggcaacagccaggagagcgtgaccgagcaggactccaaggacagcacctacagcctgagcagcaccctgaccctgagcaaggccgactacgagaagcacaaggtgtacgcctgcgaggtgacccaccagggactgtctagccccgtgaccaagagcttcaaccggggcgagtgctaa

SEQ ID NO: 756 - DNA, 645 bp, Artificial Sequence
  19B5.2E6 light chain DNA sequence
gatatacaaatgactcaaactacctcttctctttccgcatctttgggtgatcgggtcactatatcctgctccgcctctcaaggcataaacaattacctgaattggtatcagcaaaaaccagacggaactgtaaaattgcttatctactacgcttcaagtctgcatagtggggttcccagcagattttccggttccgggtccggcactgattattctctcacaattagtaacctggaacctgaggacattgcaacttattactgtcaacaatacagtcaggtaccttacactttcggatcaggaacaaagttggaaatcaagaggaccgtggccgcccccagcgtgttcatcttccctcccagcgacgagcagctgaagtctggcaccgccagcgtggtgtgcctgctgaacaacttctacccccgcgaggccaaggtgcagtggaaggtggacaacgccctgcagagcggcaacagccaggagagcgtgaccgagcaggactccaaggacagcacctacagcctgagcagcaccctgaccctgagcaaggccgactacgagaagcacaaggtgtacgcctgcgaggtgacccaccagggactgtctagccccgtgaccaagagcttcaaccggggcgagtgctaa

SEQ ID NO: 757 - DNA, 645 bp, Artificial Sequence
  20D11.2C6 light chain DNA sequence
gacatccagatgaaccagtctccatccagtctgtctgcatccctcggagacacaattaccatcacttgccgtgccagtcagaacatttatatttggttaagttggtaccagcagaaaccaggaaatattcctaaactcttgatctataaggcttccaacttgcacacaggcgtcccatcaaggtttagtggcagtggatctggaacagatttcacattaaccatcagcactctgcagcctgaagacattgccacttacttctgtctccagggtcaaagttatcctctcacgttcggtgctgggaccaagctggagatgaaacggaccgtggccgcccccagcgtgttcatcttccctcccagcgacgagcagctgaagtctggcaccgccagcgtggtgtgcctgctgaacaacttctacccccgcgaggccaaggtgcagtggaaggtggacaacgccctgcagagcggcaacagccaggagagcgtgaccgagcaggactccaaggacagcacctacagcctgagcagcaccctgaccctgagcaaggccgactacgagaagcacaaggtgtacgcctgcgaggtgacccaccagggactgtctagccccgtgaccaagagcttcaaccggggcgagtgctaa

SEQ ID NO: 758 - DNA, 645 bp, Artificial Sequence
  20H5.A3 light chain DNA sequence
gatatccagatgacacagactacatcctccctgtctgcctctctgggagacagagtcaccatcaattgcagtgcaagtcaggacattagcaattatttaaactggtatcagcagaaaccagatggaactgttaaactcctgatctattacacatcaagtttactctcaggagtcccatcaaggttcagtggcagtgggtctgggacagattattctctcaccatcagcaacctggaacctgaagatattgccacttacttttgtcagcaatatagtaagcttccctatacgttcggatcggggacccacctggaaataaaacggaccgtggccgcccccagcgtgttcatcttccctcccagcgacgagcagctgaagtctggcaccgccagcgtggtgtgcctgctgaacaacttctacccccgcgaggccaaggtgcagtggaaggtggacaacgccctgcagagcggcaacagccaggagagcgtgaccgagcaggactccaaggacagcacctacagcctgagcagcaccctgaccctgagcaaggccgactacgagaagcacaaggtgtacgcctgcgaggtgacccaccagggactgtctagccccgtgaccaagagcttcaaccggggcgagtgctaa

SEQ ID NO: 759 - DNA, 645 bp, Artificial Sequence
  23H9.2E4 light chain DNA sequence
gatatccagatgacacagactacatcctccctgtctgcctctctgggagacagagtcaccatcagttgcagtgcaagtcagggcattaacaattatttaaactggtatcagcagaaaccagatggaactgttaaactcctgatctattacgcatcaagtttacactcaggagtcccatcaaggttcagtggcagtgggtctgggacagattattctctcaccatcagcaacctggaacctgaagatattgccacttactattgtcagcagtatagtcaggttccgtatacgttcggatcggggaccaagttggaaataaaacggaccgtggccgcccccagcgtgttcatcttccctcccagcgacgagcagctgaagtctggcaccgccagcgtggtgtgcctgctgaacaacttctacccccgcgaggccaaggtgcagtggaaggtggacaacgccctgcagagcggcaacagccaggagagcgtgaccgagcaggactccaaggacagcacctacagcctgagcagcaccctgaccctgagcaaggccgactacgagaagcacaaggtgtacgcctgcgaggtgacccaccagggactgtctagccccgtgaccaagagcttcaaccggggcgagtgctaa

SEQ ID NO: 760 - DNA, 660 bp, Artificial Sequence
  2D10-VH0-VL0 light chain DNA sequence
gacatagtaatgacacaggccgcatttagcaatccagtaaccttgggcacatccgcctccatatcttgcaggtcatccaaaagcttgctgcactctgacggtattacttacctgtactggtatttgcagcgacctgggcaatcccctcaactcctgatttaccgcatgagcaacctggcctcaggggtgcctgaccgcttttcaggatcagggagcggcactgacttcaccttgcgaatcagcagagtagaagcagaggatgttggagtttactactgtgcccagatgatcgaatttccacttacttttggggccgggaccattctggagcttaaacggaccgtggccgcccccagcgtgttcatcttccctcccagcgacgagcagctgaagtctggcaccgccagcgtggtgtgcctgctgaacaacttctacccccgcgaggccaaggtgcagtggaaggtggacaacgccctgcagagcggcaacagccaggagagcgtgaccgagcaggactccaaggacagcacctacagcctgagcagcaccctgaccctgagcaaggccgactacgagaagcacaaggtgtacgcctgcgaggtgacccaccagggactgtctagccccgtgaccaagagcttcaaccggggcgagtgctaa

SEQ ID NO: 761 - DNA, 660 bp, Artificial Sequence
  3B11.2G2 light chain DNA sequence
gatgttgtgatgacccagactccactcactttgtcggttgccattggacaaccagcttccatctcttgcaagtcgagtcagagcctcttatatactaatggaaaaacctatttgaattggttattacagaggccaggccagtctccaaaacgcctaatctatctggtgtctaaattggactctggagtccctgacaggttcagtggcagtggatcagggacagatttcacactgaaaatcagcagagtggaggctgaggatttgggagtttattactgcttgcagagtacacattttccgctcacgttcggtgctgggaccaagctggagctgaaacggaccgtggccgcccccagcgtgttcatcttccctcccagcgacgagcagctgaagtctggcaccgccagcgtggtgtgcctgctgaacaacttctacccccgcgaggccaaggtgcagtggaaggtggacaacgccctgcagagcggcaacagccaggagagcgtgaccgagcaggactccaaggacagcacctacagcctgagcagcaccctgaccctgagcaaggccgactacgagaagcacaaggtgtacgcctgcgaggtgacccaccagggactgtctagccccgtgaccaagagcttcaaccggggcgagtgctaa

SEQ ID NO: 762 - DNA, 660 bp, Artificial Sequence
  7D8.2D8 light chain DNA sequence
gatgttttgatgacccaaactccactctccctgcctgtcagtcttggagatcaagcctccatctcttgcagatctagtcagagcattgtacatagtaatggaaacacctatttagaatggtacctgcagaaaccaggccagtctccaaagctcctgatctacaaagtttccaaccgattttctggggtcccagacaggttcagtggcagtggatcagggacagatttcacactcaagatcagcagagtggaggctgaggatctgggagtttattactgctttcaaggttcacatgttccgctcacgttcggtgctgggaccaagctggagctgaaacggaccgtggccgcccccagcgtgttcatcttccctcccagcgacgagcagctgaagtctggcaccgccagcgtggtgtgcctgctgaacaacttctacccccgcgaggccaaggtgcagtggaaggtggacaacgccctgcagagcggcaacagccaggagagcgtgaccgagcaggactccaaggacagcacctacagcctgagcagcaccctgaccctgagcaaggccgactacgagaagcacaaggtgtacgcctgcgaggtgacccaccagggactgtctagccccgtgaccaagagcttcaaccggggcgagtgctaa

SEQ ID NO: 763 - DNA, 663 bp, Artificial Sequence
  mIMT001 light chain DNA sequence
gatattgttattactcaggatgagcttagtaatcctgtcactagcggggaaagtgttagtatcagttgtcgttcatccaagtcactcctctacaaagacggcaagacttatctcaactggtttcttcaacgacccggtcaatctccacagctcctgatttacctgatgtcaactcacgcttctggtgttagcgaccgtttctccggaagtggctccgggacagacttcactcttgaaatctcacgtgtaaaagcagaggacgtaggtgtctattattgtcaacagcttgtggactaccccttgacctttggcgctggcacaaagctggaactgaagcgtgctgatgttgcccctactgtgtccatcttccccccctcctccgagcagctgacatccggcggcgcctccgtggtgtgcttcctgaacaacttctaccccaaagacatcaacgtgaaatggaaaatcgacggctccgagaggcagaacggcgtgctgaactcctggacagaccaggactccaaagactccacatactccatgtcctccacactgacactgacaaaagacgagtacgagaggcacaactcctacacatgcgaggccacacacaaaacatccacatcccccatcgtgaaatccttcaacaggaacgagtgctaataa

SEQ ID NO: 764 - DNA, 660 bp, Artificial Sequence
  4A11.2B5 light chain DNA sequence
gacattgtgatgactcaggcagccttttccaaccctgtaacacttggaactagtgcctccatctcatgccgttccagcaagagtcttttgcacagcgatgggataacctatctctattggtatctgcaacgacccggtcagtcaccccaacttcttatctatcgaatgtctaacttggcctccggcgtgcccgaccgcttttccgggagtgggagcggtacagatttcaccttgcgaatttcccgggttgaggcagaggacgtaggtgtctactattgtgctcagatgcttgagtttcctctcactttcggagccggcaccaaactggaactgaaacggaccgtggccgcccccagcgtgttcatcttccctcccagcgacgagcagctgaagtctggcaccgccagcgtggtgtgcctgctgaacaacttctacccccgcgaggccaaggtgcagtggaaggtggacaacgccctgcagagcggcaacagccaggagagcgtgaccgagcaggactccaaggacagcacctacagcctgagcagcaccctgaccctgagcaaggccgactacgagaagcacaaggtgtacgcctgcgaggtgacccaccagggactgtctagccccgtgaccaagagcttcaaccggggcgagtgctaa

SEQ ID NO: 765 - DNA, 660 bp, Artificial Sequence; identical to SEQ ID NO: 751
  4A11.H1L1 light chain DNA sequence

SEQ ID NO: 766 - DNA, 660 bp, Artificial Sequence
  4A11.H4L2 light chain DNA sequence
gatattgtaatgacccaaagccccctgtccttgcctgttaccccaggtgagcctgccagcatatcttgccgatccagtaaatctctgcttcatagcgatggcatcacctatttgtattggtatttgcagaagcccggccagagcccccagttgctgatctacagaatgtccaaccttgctagtggagtgcccgaccggtttagcggttcaggctcagggactgatttcactcttaaaatcagtagggtagaggccgaagacgttggtgtatattattgtgctcagatgttggagtttccactcacatttggacaaggtacaaagctggaaattaagcggaccgtggccgcccccagcgtgttcatcttccctcccagcgacgagcagctgaagtctggcaccgccagcgtggtgtgcctgctgaacaacttctacccccgcgaggccaaggtgcagtggaaggtggacaacgccctgcagagcggcaacagccaggagagcgtgaccgagcaggactccaaggacagcacctacagcctgagcagcaccctgaccctgagcaaggccgactacgagaagcacaaggtgtacgcctgcgaggtgacccaccagggactgtctagccccgtgaccaagagcttcaaccggggcgagtgctaa

SEQ ID NO: 767 - DNA, 660 bp, Artificial Sequence
  4G2.2G6 light chain DNA sequence
gatgtcgtaatgactcaaacccccctgacccttagtgttactataggccagcccgcaagcatctcctgcaaatcctcccagtctcttctttatactgatggcaaaacctacttgtcctggtttttgcagcgcccaggtcaaagtcctaaacgtcttatttacttggtctctaaactcgattccggcgtgcctgaccggttctccggtagcggtagcggtaccgatttcactttgaagattagccgagttgaggcagaagacctcggggtctactactgccttcagagtacacacttcccacttacatttggcgcaggaaccaagttggaggttaaacggaccgtggccgcccccagcgtgttcatcttccctcccagcgacgagcagctgaagtctggcaccgccagcgtggtgtgcctgctgaacaacttctacccccgcgaggccaaggtgcagtggaaggtggacaacgccctgcagagcggcaacagccaggagagcgtgaccgagcaggactccaaggacagcacctacagcctgagcagcaccctgaccctgagcaaggccgactacgagaagcacaaggtgtacgcctgcgaggtgacccaccagggactgtctagccccgtgaccaagagcttcaaccggggcgagtgctaa

SEQ ID NO: 768 - DNA, 645 bp, Artificial Sequence
  6B3.2D3 light chain DNA sequence
agtattgtgatgacccagactcccaaattcctgcttgtatcagcaggagacagggttaccataacctgcaaggccagtcagagtgtgagtaatgatgtagcttggtaccaacagaagccagggcagtctcctaaattgttgatatattatgcatccaatcgctacactggagtccctgatcgcttcactggcagtggatatgggacggatttcactttcaccatcagcactgtgcaggctgaagacctggcagtttatttctgtcagcaggattatacctctccgtacacgttcggaggggggaccaagctggaaataaaacggaccgtggccgcccccagcgtgttcatcttccctcccagcgacgagcagctgaagtctggcaccgccagcgtggtgtgcctgctgaacaacttctacccccgcgaggccaaggtgcagtggaaggtggacaacgccctgcagagcggcaacagccaggagagcgtgaccgagcaggactccaaggacagcacctacagcctgagcagcaccctgaccctgagcaaggccgactacgagaagcacaaggtgtacgcctgcgaggtgacccaccagggactgtctagccccgtgaccaagagcttcaaccggggcgagtgctaa

SEQ ID NO: 769 - DNA, 645 bp, Artificial Sequence
  6H6.2D6 light chain DNA sequence
gacatccagatgacccagaccacctcctccctgtccgcctccctgggcgacagggtgaccatctcctgctccgcctcccagggcatctccaactacctgaactggtaccagcagaagcccgacggcaccgtgaagctgctgatctactacacctcctccctgcactccggcgtgccctccaggttctccggctccggctccggcaccgactactccctgaccatctccaacctggagcccgaggacatcgccacctactactgccagcagtactccgagctgccctacaccttcggctccggcaccaagctggagatcaagaggaccgtggccgcccccagcgtgttcatcttccctcccagcgacgagcagctgaagtctggcaccgccagcgtggtgtgcctgctgaacaacttctacccccgcgaggccaaggtgcagtggaaggtggacaacgccctgcagagcggcaacagccaggagagcgtgaccgagcaggactccaaggacagcacctacagcctgagcagcaccctgaccctgagcaaggccgactacgagaagcacaaggtgtacgcctgcgaggtgacccaccagggactgtctagccccgtgaccaagagcttcaaccggggcgagtgctaa

SEQ ID NO: 770 - DNA, 645 bp, Artificial Sequence
  9H2.2H10 light chain DNA sequence
gacattgtgatgacccagtctcacaaattcatgtccacatcagtaggagacagggtcagcatcacctgcaaggccagtcaggatgtgagtactgctgtagcctggtatcaacaaaaaccagggcaatctcctaaactactgatttactgggcatccacccggcacactggagtccctgatcgcttcacaggcagtggatctgggacagattatactctcaccatcagcagtgtgcaggctgaagacctggcactttattactgtcagcaacattataccactccgctcacgttcggtgctgggaccaagctggagctgaaacggaccgtggccgcccccagcgtgttcatcttccctcccagcgacgagcagctgaagtctggcaccgccagcgtggtgtgcctgctgaacaacttctacccccgcgaggccaaggtgcagtggaaggtggacaacgccctgcagagcggcaacagccaggagagcgtgaccgagcaggactccaaggacagcacctacagcctgagcagcaccctgaccctgagcaaggccgactacgagaagcacaaggtgtacgcctgcgaggtgacccaccagggactgtctagccccgtgaccaagagcttcaaccggggcgagtgctaa

SEQ ID NO: 771 - DNA, 645 bp, Artificial Sequence
  13G4.2F8 light chain DNA sequence
gacattgtgatgacccagtctcaaaaattcatgtccacatcagtaggagagagggtcagcatcacctgcaaggccagtcagaatgtaggtactaatgtagcctggtatcagcagaaagcagggcagtctcttgaactgctgatctatggggcatccaaccggcacactggagtccctgatcgcttcacaggcagtggatctgggacagatttcactctcaccatcaccaatgtgcagtctgaagacatgacaaattatttctgtgagcaatatagcaactttcctctcacgttcggtgctgggaccaagctggagctgaaacggaccgtggccgcccccagcgtgttcatcttccctcccagcgacgagcagctgaagtctggcaccgccagcgtggtgtgcctgctgaacaacttctacccccgcgaggccaaggtgcagtggaaggtggacaacgccctgcagagcggcaacagccaggagagcgtgaccgagcaggactccaaggacagcacctacagcctgagcagcaccctgaccctgagcaaggccgactacgagaagcacaaggtgtacgcctgcgaggtgacccaccagggactgtctagccccgtgaccaagagcttcaaccggggcgagtgctaa

SEQ ID NO: 772 - DNA, 660 bp, Artificial Sequence
  13H12.2F8 light chain DNA sequence
gacgttgttatgacacaaacaccacttacactttctgtaactatcggtcagcctgcctcaatttcatgtaagtcttctcagtccctgtttcatagcgacgggaagacttacctgaattggcttctccaacgaccaggccaatcacccaagcgccttatttatttggtcagtaaattggacagtggagttcccgatagatttaccgggagcggttctgggaccgatttcaccccaaagatctccagggtagaagacgaagatctcggtgtgtactattgctggcaggggacacatttccctctgacattcggtgctggaaccaaacttgagatgaaacggaccgtggccgcccccagcgtgttcatcttccctcccagcgacgagcagctgaagtctggcaccgccagcgtggtgtgcctgctgaacaacttctacccccgcgaggccaaggtgcagtggaaggtggacaacgccctgcagagcggcaacagccaggagagcgtgaccgagcaggactccaaggacagcacctacagcctgagcagcaccctgaccctgagcaaggccgactacgagaagcacaaggtgtacgcctgcgaggtgacccaccagggactgtctagccccgtgaccaagagcttcaaccggggcgagtgctaa

SEQ ID NO: 773 - DNA, 645 bp, Artificial Sequence
  15G7.2A7 light chain DNA sequence
gacatccagatgaaccagtctccatccagtctgtctgcatccctcggagacacaatttccatcacttgccgtgccagtcagaacattaatatttggttaagctggtaccagcagaaaccaggaaatattcctcaactattgatctataaggcttccaacttgcacacaggcgtcccctcaaggtttagtggcagtggatctggaacagatttcacattaaccatcagcagtctgcagcctgaagacattgccacttactactgtctacagggtcaaagttatcctctcacgttcggtgctgggaccaagctggtgatgaaacggaccgtggccgcccccagcgtgttcatcttccctcccagcgacgagcagctgaagtctggcaccgccagcgtggtgtgcctgctgaacaacttctacccccgcgaggccaaggtgcagtggaaggtggacaacgccctgcagagcggcaacagccaggagagcgtgaccgagcaggactccaaggacagcacctacagcctgagcagcaccctgaccctgagcaaggccgactacgagaagcacaaggtgtacgcctgcgaggtgacccaccagggactgtctagccccgtgaccaagagcttcaaccggggcgagtgctaa

SEQ ID NO: 774 - DNA, 654 bp, Artificial Sequence
  19D9.2E5 light chain DNA sequence
gatgttgtgatgacccagactccactcactttgtcggttaccattggacaaccagcctccatctcttgtaagtcaagtcagagcctcttacatagtgatggaaagacatatttgaattggttgttacagaggccaggccagcctccaaagcgcctaatgtatctggtgtctacactggactctggagtccctgacaggttcactggcagtggatcagggacagatttcacactgaaaatcagcagagtggaggctgaggatttgggagtttattattgctggcaaggtacacattttcctctcacgttcggtgctgggaccaagccggagcggaccgtggccgcccccagcgtgttcatcttccctcccagcgacgagcagctgaagtctggcaccgccagcgtggtgtgcctgctgaacaacttctacccccgcgaggccaaggtgcagtggaaggtggacaacgccctgcagagcggcaacagccaggagagcgtgaccgagcaggactccaaggacagcacctacagcctgagcagcaccctgaccctgagcaaggccgactacgagaagcacaaggtgtacgcctgcgaggtgacccaccagggactgtctagccccgtgaccaagagcttcaaccggggcgagtgctaa

SEQ ID NO: 775 - DNA, 654 bp, Artificial Sequence
  23B10.2B12 light chain DNA sequence
gatattgtgatgacgcaggctgcattctccaatccagtcactcttggaacgtcagcttccatctcctgcaggtctagtaagagtctcctacatagtgatggcatcacttatttctattggtatctgcagaggccaggccagtctcctcagctcctgatatatcggatgtccaaccttgcctcaggagtcccagacaggttcagtggcagtgggtcaggaactgatttcacactgagaatcagcagagtggaggctgaggatgtgggtgtttattactgtgctcaaatgctagaattcccgctcacgttcggtgctgggaccaagctggagcggaccgtggccgcccccagcgtgttcatcttccctcccagcgacgagcagctgaagtctggcaccgccagcgtggtgtgcctgctgaacaacttctacccccgcgaggccaaggtgcagtggaaggtggacaacgccctgcagagcggcaacagccaggagagcgtgaccgagcaggactccaaggacagcacctacagcctgagcagcaccctgaccctgagcaaggccgactacgagaagcacaaggtgtacgcctgcgaggtgacccaccagggactgtctagccccgtgaccaagagcttcaaccggggcgagtgctaa

SEQ ID NO: 776 - DNA, 645 bp, Artificial Sequence
  24D12.2H9 light chain DNA sequence
gacattgtgatgacccagtctcacaaattcatgtccacatcagtaggagacagggtcagcatcacctgcaaggccagtcaggatgtgcgtactgctgtagcctggtatcaacagaaaccagggcaatctcctaaactactgatttactgggcatccacccggcacactggagtccctgatcgcttcacaggcagtggatctgggacagatttcactctcacccttagcaatgtgcagtctgaagacttggcagattatttctgtcagcaatatagtagttatccgtggacgttcggtggaggcaccaagctggaaatcaaacggaccgtggccgcccccagcgtgttcatcttccctcccagcgacgagcagctgaagtctggcaccgccagcgtggtgtgcctgctgaacaacttctacccccgcgaggccaaggtgcagtggaaggtggacaacgccctgcagagcggcaacagccaggagagcgtgaccgagcaggactccaaggacagcacctacagcctgagcagcaccctgaccctgagcaaggccgactacgagaagcacaaggtgtacgcctgcgaggtgacccaccagggactgtctagccccgtgaccaagagcttcaaccggggcgagtgctaa

SEQ ID NO: 777 - DNA, 660 bp, Artificial Sequence
  F846C.1B2 light chain DNA sequence
aacatttggttgacacagtcgccatcatctctggctgtgtctgcaggagaaatggtcactatgacctgtaagtccagtcaaagtgttttatacagttcaaatcagaagaactacttggcctggtaccagcagaaaccagggcagtctcctaaactgctgatctactgggcatccactagggaatctggtgtccctgatcgcttcacaggcagtggatctgggacagacttttctcttaccatcagcagtgtacaagctgaagacctggcagtttattactgtcatcaatatctctcctcgctcacgttcggtgctgggaccaagctggagctgaaacggaccgtggccgcccccagcgtgttcatcttccctcccagcgacgagcagctgaagtctggcaccgccagcgtggtgtgcctgctgaacaacttctacccccgcgaggccaaggtgcagtggaaggtggacaacgccctgcagagcggcaacagccaggagagcgtgaccgagcaggactccaaggacagcacctacagcctgagcagcaccctgaccctgagcaaggccgactacgagaagcacaaggtgtacgcctgcgaggtgacccaccagggactgtctagccccgtgaccaagagcttcaaccggggcgagtgctaa

SEQ ID NO: 778 - DNA, 660 bp, Artificial Sequence
  F846C.1F5 light chain DNA sequence
aacattatgatgacacagtcgccatcatctctggctgtgtctgcaggagaaaaggtcactatgagctgtaagtccagtcaaagtgttttatacagttcaaatcagaagaactacttggcctggtaccagcagaaaccagggcagtctcctaaactgctgatctactgggcatccactagggaatctggtgtccctgatcgcttcacaggcagtggatctgggacagattttactcttaccatcagcagtgtacaacctgaagacctggcagtttattactgtcatcaatacctctcctcgctcacgttcggtgctgggaccaagctggagctgaaacggaccgtggccgcccccagcgtgttcatcttccctcccagcgacgagcagctgaagtctggcaccgccagcgtggtgtgcctgctgaacaacttctacccccgcgaggccaaggtgcagtggaaggtggacaacgccctgcagagcggcaacagccaggagagcgtgaccgagcaggactccaaggacagcacctacagcctgagcagcaccctgaccctgagcaaggccgactacgagaagcacaaggtgtacgcctgcgaggtgacccaccagggactgtctagccccgtgaccaagagcttcaaccggggcgagtgctaa

SEQ ID NO: 779 - DNA, 660 bp, Artificial Sequence
  F846C.1H12 light chain DNA sequence
aacattatgatgacacagtcgccatcatctctggctgtgtctgcaggacaaaaggtcactatgagctgtaagtccagtcaaagtgttttatacagttcaagtcagaagaactacttggcctggtaccagcagaaaccagggcagtctcctaaacttctgatctactgggcatccactagggaatctggtgtccctgatcgcttctcaggcagtggatctgggacagattttactcttaccatcagcagtgtacaacctgaagacctggcagtttattactgtcatcaatacctctcctcgctcacgttcggtgctgggaccaagctggagctgaaacggaccgtggccgcccccagcgtgttcatcttccctcccagcgacgagcagctgaagtctggcaccgccagcgtggtgtgcctgctgaacaacttctacccccgcgaggccaaggtgcagtggaaggtggacaacgccctgcagagcggcaacagccaggagagcgtgaccgagcaggactccaaggacagcacctacagcctgagcagcaccctgaccctgagcaaggccgactacgagaagcacaaggtgtacgcctgcgaggtgacccaccagggactgtctagccccgtgaccaagagcttcaaccggggcgagtgctaa

SEQ ID NO: 780 - DNA, 663 bp, Artificial Sequence
  F846C.1H5 light chain DNA sequence
gatgttgtgatgacccaaactccactctccctgcctgtcagtcttggagatcaagcctccatctcttgcagatctagtcagagccttgtacacaatagtggaaacacctatttacattggtacctgcagaggccaggccagtctccaaacctcctgatctacaaagtttccaaccgattttctggggtcccagacaggttcagtggcagtggatcagggacagatttcacactcaagatcagcagagtggcggctgaggatctgggagtttatttctgctctcaaagtacacatgttcctccgacgttcggtggaggcaccaagctggaaatcaaacggaccgtggccgcccccagcgtgttcatcttccctcccagcgacgagcagctgaagtctggcaccgccagcgtggtgtgcctgctgaacaacttctacccccgcgaggccaaggtgcagtggaaggtggacaacgccctgcagagcggcaacagccaggagagcgtgaccgagcaggactccaaggacagcacctacagcctgagcagcaccctgaccctgagcaaggccgactacgagaagcacaaggtgtacgcctgcgaggtgacccaccagggactgtctagccccgtgaccaagagcttcaaccggggcgagtgctaagga

SEQ ID NO: 781 - DNA, 660 bp, Artificial Sequence; identical to SEQ ID NO: 778
  F846C.2H3 light chain DNA sequence

SEQ ID NO: 782 - DNA, 651 bp, Artificial Sequence
  F846TC.14A2 light chain DNA sequence
caggctgttgtgactcaggaatctgcactcaccacatcacctggtgaaacagtcacactcacttgtcgctcaagtactggggctgttacaactagtaactatgccaactgggtccaagaaaaaccagatcatttattcactggtctaataggtggtatcaataaccgagttccaggtgttcctgccagattctcaggctccctgattggagacaaggcagccctcaccatcacaggggcacagactgaggatgaggcaatatatttctgtgctctatggtatagcaaccattgggtgttcggtggaggaaccaaactgactgtcctacggaccgtggccgcccccagcgtgttcatcttccctcccagcgacgagcagctgaagtctggcaccgccagcgtggtgtgcctgctgaacaacttctacccccgcgaggccaaggtgcagtggaaggtggacaacgccctgcagagcggcaacagccaggagagcgtgaccgagcaggactccaaggacagcacctacagcctgagcagcaccctgaccctgagcaaggccgactacgagaagcacaaggtgtacgcctgcgaggtgacccaccagggactgtctagccccgtgaccaagagcttcaaccggggcgagtgctaa

SEQ ID NO: 783 - DNA, 660 bp, Artificial Sequence
  F846TC.14E4 light chain DNA sequence
gatattgtgatgacgcaggctgcattctccaatccagtcactcttggaacatcagcttccatctcctgcaggtctagtaagagtctcctacatactaatggcatcacttttttgtattggtatctgcagaagccaggccagtctcctcagcccctgatttatcagatgtccaaccttgcctcaggagtcccagacaggttcagtagcagtgggtcaggaactgatttcacactgagaatcagcagagtggaggctgaggatgtgggtgtttattactgtgctcaaaatctagaacttccttggacgttcggtggaggcaccaagctggaaatcaatcggaccgtggccgcccccagcgtgttcatcttccctcccagcgacgagcagctgaagtctggcaccgccagcgtggtgtgcctgctgaacaacttctacccccgcgaggccaaggtgcagtggaaggtggacaacgccctgcagagcggcaacagccaggagagcgtgaccgagcaggactccaaggacagcacctacagcctgagcagcaccctgaccctgagcaaggccgactacgagaagcacaaggtgtacgcctgcgaggtgacccaccagggactgtctagccccgtgaccaagagcttcaaccggggcgagtgctaa

SEQ ID NO: 784 - DNA, 660 bp, Artificial Sequence
  F846TC.16B5 light chain DNA sequence
aacattatgatgacacagtcgccatcatctctggctgtgtctgcaggagaaaaggtcactatgagctgtaagtccagtcaaagtgttttatacagttcaaatcagaagaactacttggcctggtaccagcagaaaccagggcagtctcctaaactactgatctactgggcatccactagggaatctggtgtccctgatcgcttcacaggcagtggatctgggacagattttactcttaccatcagcagtgtacaagctgaagacctggcagtttattactgtcatcaatacctctcctcgctcacgttcggtgctgggaccaagctggagctgaaacggaccgtggccgcccccagcgtgttcatcttccctcccagcgacgagcagctgaagtctggcaccgccagcgtggtgtgcctgctgaacaacttctacccccgcgaggccaaggtgcagtggaaggtggacaacgccctgcagagcggcaacagccaggagagcgtgaccgagcaggactccaaggacagcacctacagcctgagcagcaccctgaccctgagcaaggccgactacgagaagcacaaggtgtacgcctgcgaggtgacccaccagggactgtctagccccgtgaccaagagcttcaaccggggcgagtgctaa

SEQ ID NO: 785 - DNA, 663 bp, Artificial Sequence
  F846TC.7F10 light chain DNA sequence
gacattgtgatgacacagtctccatcctccctggctatgtcagtaggacagaaggtcactatgagctgcaagtccagtcagagccttttaaatagtagcaatcaaaagaactatttggcctggtaccagcagaaaccaggacagtctcctaaacttctggtatactttgcatccactagggaatctggggtccctgatcgcttcataggcagtggatctgggacagatttcactcttaccatcagcagtgtgcaggctgaagacctggcagattacttctgtcagcaacattatagcactccgtacacgttcggagggggggccaagctggaaataaaacggaccgtggccgcccccagcgtgttcatcttccctcccagcgacgagcagctgaagtctggcaccgccagcgtggtgtgcctgctgaacaacttctacccccgcgaggccaaggtgcagtggaaggtggacaacgccctgcagagcggcaacagccaggagagcgtgaccgagcaggactccaaggacagcacctacagcctgagcagcaccctgaccctgagcaaggccgactacgagaagcacaaggtgtacgcctgcgaggtgacccaccagggactgtctagccccgtgaccaagagcttcaaccggggcgagtgctaa

SEQ ID NO: 786 - DNA, 645 bp, Artificial Sequence
  F847C.10B9 light chain DNA sequence
gacatccggatgactcagtctccatccagtctgtctgcatcccttggagacacaattaccatcacttgccatgccagtcagaacattaatgtttggttaagctggtaccagcagaaaccaggaaatattcctaaactattgatctataaggcttccaacttgcacacaggcgtcccatcaaggtttagtggcagtggatctggaacaggtttcacattaaccatcagcagcctgcagcctgaagacattgccacttactactgtcaacagggtcaaagttatccgtacacgttcggaggggggaccaagctggagctgaaacggaccgtggccgcccccagcgtgttcatcttccctcccagcgacgagcagctgaagtctggcaccgccagcgtggtgtgcctgctgaacaacttctacccccgcgaggccaaggtgcagtggaaggtggacaacgccctgcagagcggcaacagccaggagagcgtgaccgagcaggactccaaggacagcacctacagcctgagcagcaccctgaccctgagcaaggccgactacgagaagcacaaggtgtacgcctgcgaggtgacccaccagggactgtctagccccgtgaccaagagcttcaaccggggcgagtgctaa

SEQ ID NO: 787 - DNA, 645 bp, Artificial Sequence
  F847C.11B1 light chain DNA sequence
gaaattgtgttgacccagtctccagcatccctgtccgtgactacaggagaaaaagtcactatcagatgcataaccagcattgatattgatgatgatatgaactggtaccagcagaagccaggggaacctcctaagctccttatttcagaaggcaatactcttcgtcctggagtcccatcccgattctccagcagtggctatggcacagattttgtttttacaattgaaaacacgctctcagaagatgttgcagattactactgtttgcaaagtgataacaagcctctcacgttcggtgctgggaccaagctggagctgaaacggaccgtggccgcccccagcgtgttcatcttccctcccagcgacgagcagctgaagtctggcaccgccagcgtggtgtgcctgctgaacaacttctacccccgcgaggccaaggtgcagtggaaggtggacaacgccctgcagagcggcaacagccaggagagcgtgaccgagcaggactccaaggacagcacctacagcctgagcagcaccctgaccctgagcaaggccgactacgagaagcacaaggtgtacgcctgcgaggtgacccaccagggactgtctagccccgtgaccaagagcttcaaccggggcgagtgctaa

SEQ ID NO: 788 - DNA, 645 bp, Artificial Sequence
  F847C.12F12 light chain DNA sequence
gacatccaggtgattcagtctccatccagtctgtctgcatcccttggagacacaattaccatcacttgccatgccagtcagaacattaatgtttggttaagctggtaccagcagaaaccaggaaatattcctaaactattgatctataaggcttccaacttgcacacaggcgtcccatcaaggtttagtggcagtggatctggaacaggtttcacattaaccatcagcagcctgcagcctgaagacattgccacttactactgtcaacagggtcaaagttatccgtacacgttcggaggggggaccaagctggagctgaaacggaccgtggccgcccccagcgtgttcatcttccctcccagcgacgagcagctgaagtctggcaccgccagcgtggtgtgcctgctgaacaacttctacccccgcgaggccaaggtgcagtggaaggtggacaacgccctgcagagcggcaacagccaggagagcgtgaccgagcaggactccaaggacagcacctacagcctgagcagcaccctgaccctgagcaaggccgactacgagaagcacaaggtgtacgcctgcgaggtgacccaccagggactgtctagccccgtgaccaagagcttcaaccggggcgagtgctaa

SEQ ID NO: 789 - DNA, 646 bp, Artificial Sequence
  F847C.26F5 light chain DNA sequence
gaaattaagatgaaccagtctccatccagtctgtctgcatcccttggagacacaattaccatcacttgccatgccagtcagaacattaatgtttggttaagctggtaccagcagaaaccaggaaatattcctaaactattgatctataaggcttccaacttgcacacaggcgtcccatcaaggtttagtggcagtggatctggaacaggtttcacattaaccatcagcagcctacagcctgaagacattgccacttactactgtcaacagggtcaaagttatccgtacacgttcggaggggggaccaagctggagctgaaaaggaccgtggccgcccccagcgtgttcatcttccctcccagcgacgagcagctgaagtctggcaccgccagcgtggtgtgcctgctgaacaacttctacccccgcgaggccaaggtgcagtggaaggtggacaacgccctgcagagcggcaacagccaggagagcgtgaccgagcaggactccaaggacagcacctacagcctgagcagcaccctgaccctgagcaaggccgactacgagaagcacaaggtgtacgcctgcgaggtgacccaccagggactgtctagccccgtgaccaagagcttcaaccggggcgagtgctaag

SEQ ID NO: 790 - DNA, 651 bp, Artificial Sequence
  F847C.4B10 light chain DNA sequence
caggctgttgtgactcaggaatctgcactcaccacatcacctggtgaaacagtcacactcacttgtcgctcaagtactggggctgttacaactagtaactatgccaactgggtccaagaaaaaccagatcatttattcactggtctaataggtggtaccaacaaccgagctccaggtgttcctgccagattctcaggctccctgattggagacaaggctgccctcaccatcacaggggcacagactgaggatgaggcaatatatttctgtgctctatggtacagcaaccatttagtgttcggtggaggaaccaaactgactgtcctaaggaccgtggccgcccccagcgtgttcatcttccctcccagcgacgagcagctgaagtctggcaccgccagcgtggtgtgcctgctgaacaacttctacccccgcgaggccaaggtgcagtggaaggtggacaacgccctgcagagcggcaacagccaggagagcgtgaccgagcaggactccaaggacagcacctacagcctgagcagcaccctgaccctgagcaaggccgactacgagaagcacaaggtgtacgcctgcgaggtgacccaccagggactgtctagccccgtgaccaagagcttcaaccggggcgagtgctaa

SEQ ID NO: 791 - DNA, 660 bp, Artificial Sequence
  F849C.8D10 light chain DNA sequence
gatgttttgatgacccaaactccactctccctgcctgtcagtcttggagatcaagcctccatctcttgcagatctagtcaggacattgtgcatagtagtggaaacacctatttagaatggtacctgcagaaaccaggccagtctctaaagctcctgatttacaaagtttccaaccgattttctggggtcccagacaggttcagtgccagtggatcagggacagatttcacactcaagatcagcagagtggaggctgaggatctgggagtttattactgctttcaaggttcacatgttcctcccacgttcggctcggggacaaagttggaaataaaacggaccgtggccgcccccagcgtgttcatcttccctcccagcgacgagcagctgaagtctggcaccgccagcgtggtgtgcctgctgaacaacttctacccccgcgaggccaaggtgcagtggaaggtggacaacgccctgcagagcggcaacagccaggagagcgtgaccgagcaggactccaaggacagcacctacagcctgagcagcaccctgaccctgagcaaggccgactacgagaagcacaaggtgtacgcctgcgaggtgacccaccagggactgtctagccccgtgaccaagagcttcaaccggggcgagtgctaa

SEQ ID NO: 792 - DNA, 660 bp, Artificial Sequence
  F849C.8H3 light chain DNA sequence
gatattgggatgaggcaggctgcattctccaatccagtcactcttggaacatcagcttccatctcctgcaggtctagtaagagtctcctatatagtaatggcatcacttatttgtattggtttctccagaagccaggccagtctcctcagctcctgatttatcagatgtccaaccttgcctcaggagtcccagacaggttcagtagcagtgggtcaggaactgatttcacactgagaatcagcagagtggaggctgacgatgtgggtgtttattactgtgctcaaaatctagaacttccgtggacgttcggtggaggcaccaagctggaaatcaaacggaccgtggccgcccccagcgtgttcatcttccctcccagcgacgagcagctgaagtctggcaccgccagcgtggtgtgcctgctgaacaacttctacccccgcgaggccaaggtgcagtggaaggtggacaacgccctgcagagcggcaacagccaggagagcgtgaccgagcaggactccaaggacagcacctacagcctgagcagcaccctgaccctgagcaaggccgactacgagaagcacaaggtgtacgcctgcgaggtgacccaccagggactgtctagccccgtgaccaagagcttcaaccggggcgagtgctaa

SEQ ID NO: 793 - DNA, 657 bp, Artificial Sequence
  846.2B11 light chain DNA sequence
gacattgtgctgacacagtctcctgcttccttaggtgtttctctggggcagagggccaccatctcatgcagggccagcaaaagtgtcagtacatctggctatagttatatgcactggtaccaacagaaaccaggacagccacccaaactcctcatctatcttgcatccatcctagaatctggggtccctgccaggttcagtggcagtgggtctgggacagacttcaccctcaacatccatcctgtggaggaggaggatgctgcaatctattactgtcagcacagtagggagcttcctctcacgttcggtgctgggaccaagctggagctgaaacggaccgtggccgcccccagcgtgttcatcttccctcccagcgacgagcagctgaagtctggcaccgccagcgtggtgtgcctgctgaacaacttctacccccgcgaggccaaggtgcagtggaaggtggacaacgccctgcagagcggcaacagccaggagagcgtgaccgagcaggactccaaggacagcacctacagcctgagcagcaccctgaccctgagcaaggccgactacgagaagcacaaggtgtacgcctgcgaggtgacccaccagggactgtctagccccgtgaccaagagcttcaaccggggcgagtgctaa

SEQ ID NO: 794 - DNA, 657 bp, Artificial Sequence
  846.4D5 light chain DNA sequence
aacattgtgctgacccaatctccagcttctttggctgtgtctctagggcagagggccaccatatcctgcagagccagtgaaagtgttgatagttatggcaatagttttatgcactggtaccagcagaaaccaggacagccacccaaactcctcatctatcttgcatccaacctagaatctggggtccctgccaggttcagtggcagtgggtctaggacagacttcaccctcaccattgatcctgtggaggctgatgatgctgcaacctattactgtcagcaaaataatgaggatccgtggacgttcggtggaggcaccaagctggaaatcaaacggaccgtggccgcccccagcgtgttcatcttccctcccagcgacgagcagctgaagtctggcaccgccagcgtggtgtgcctgctgaacaacttctacccccgcgaggccaaggtgcagtggaaggtggacaacgccctgcagagcggcaacagccaggagagcgtgaccgagcaggactccaaggacagcacctacagcctgagcagcaccctgaccctgagcaaggccgactacgagaagcacaaggtgtacgcctgcgaggtgacccaccagggactgtctagccccgtgaccaagagcttcaaccggggcgagtgctaa

SEQ ID NO: 795 - DNA, 660 bp, Artificial Sequence
  846T.1H2 light chain DNA sequence
gatgttgtgatgacccagactccactcactttgtcggttaccattggacaaccagcctctatctcttgcaagtcaagtcagagtctcttatatagtaatggaaaaacctatttgaattggttattacagaggccaggccagtctccaaagcgcctaatctatctggtgtctaaactggactctggagtccctgacaggttcactggcagtggatcaggaacagattttacactgaaaatcagcagagtggaggctgaggatttgggagtttattactgcgtgcaaggtacacattttcctcagacgttcggtggaggcaccaagctggaaataaaaaggaccgtggccgcccccagcgtgttcatcttccctcccagcgacgagcagctgaagtctggcaccgccagcgtggtgtgcctgctgaacaacttctacccccgcgaggccaaggtgcagtggaaggtggacaacgccctgcagagcggcaacagccaggagagcgtgaccgagcaggactccaaggacagcacctacagcctgagcagcaccctgaccctgagcaaggccgactacgagaagcacaaggtgtacgcctgcgaggtgacccaccagggactgtctagccccgtgaccaagagcttcaaccggggcgagtgctaa

SEQ ID NO: 796 - DNA, 651 bp, Artificial Sequence; identical to SEQ ID NO: 790
  847.14H4 light chain DNA sequence

SEQ ID NO: 797 - DNA, 20 bp, Artificial Sequence
  Il6 forward primer
ttccatccagttgccttctt

SEQ ID NO: 798 - DNA, 20 bp, Artificial Sequence
  Il6 reverse primer
cagaattgccattgcacaac

SEQ ID NO: 799 - DNA, 20 bp, Artificial Sequence
  Tnfa forward primer
aagaggcactcccccaaaag

SEQ ID NO: 800 - DNA, 19 bp, Artificial Sequence
  Tnfa reverse primer
gtttgctacgacgtgggct

SEQ ID NO: 801 - DNA, 20 bp, Artificial Sequence
  Il1b forward primer
gcagtggttcgaggcctaat

SEQ ID NO: 802 - DNA, 20 bp, Artificial Sequence
  Il1b reverse primer
tgatactgcctgcctgaagc

SEQ ID NO: 803 - DNA, 22 bp, Artificial Sequence
  Col1a1 forward primer
cctcagggtattgctggacaac

SEQ ID NO: 804 - DNA, 22 bp, Artificial Sequence
  Col1a1 reverse primer
cagaaggaccttgtttgccagg

SEQ ID NO: 805 - DNA, 19 bp, Artificial Sequence
  aSma forward primer
tgaacaagccggtgctctc

SEQ ID NO: 806 - DNA, 20 bp, Artificial Sequence
  aSma reverse primer
ggtcaggatacctcgcttgc

SEQ ID NO: 807 - DNA, 20 bp, Artificial Sequence
  Tgfb forward primer
atgctaaagaggtcacccgc

SEQ ID NO: 808 - DNA, 20 bp, Artificial Sequence
  Tgfb reverse primer
tgccgtacaactccagtgac

SEQ ID NO: 809 - DNA, 22 bp, Artificial Sequence
  Vegfa forward primer
ctgctgtaacgatgaagccctg

SEQ ID NO: 810 - DNA, 22 bp, Artificial Sequence
  Vegfa reverse primer
gctgtaggaagctcatctctcc

SEQ ID NO: 811 - DNA, 22 bp, Artificial Sequence
  Vegfb forward primer
actgggcaacaccaagtccgaa

SEQ ID NO: 812 - DNA, 23 bp, Artificial Sequence
  Vegfb reverse primer
cacattggctgtgttcttccagg

SEQ ID NO: 813 - DNA, 20 bp, Artificial Sequence
  Inos forward primer
aaggcaagcaccttggaaga

SEQ ID NO: 814 - DNA, 20 bp, Artificial Sequence
  Inos reverse primer
ggacagcttctggtcgatgt

SEQ ID NO: 815 - DNA, 22 bp, Artificial Sequence
  Gal3 forward primer
gcccttgcctggaggagtcatg

SEQ ID NO: 816 - DNA, 23 bp, Artificial Sequence
  Gal3 reverse primer
cattgaagcgggggttaaagtgg

SEQ ID NO: 817 - DNA, 23 bp, Artificial Sequence
  Gapdh forward primer
catcactgccacccagaagactg

SEQ ID NO: 818 - DNA, 23 bp, Artificial Sequence
  Gapdh reverse primer
atgccagtgagcttcccgttcag

SEQ ID NO: 819 - protein, 1273 aa, Artificial Sequence
  SARS-CoV-2 spike (S) protein
MFVFLVLLPLVSSQCVNLTTRTQLPPAYTNSFTRGVYYPDKVFRSSVLHSTQDLFLPFFSNVTWFHAIHVSGTNGTKRFDNPVLPFNDGVYFASTEKSNIIRGWIFGTTLDSKTQSLLIVNNATNVVIKVCEFQFCNDPFLGVYYHKNNKSWMESEFRVYSSANNCTFEYVSQPFLMDLEGKQGNFKNLREFVFKNIDGYFKIYSKHTPINLVRDLPQGFSALEPLVDLPIGINITRFQTLLALHRSYLTPGDSSSGWTAGAAAYYVGYLQPRTFLLKYNENGTITDAVDCALDPLSETKCTLKSFTVEKGIYQTSNFRVQPTESIVRFPNITNLCPFGEVFNATRFASVYAWNRKRISNCVADYSVLYNSASFSTFKCYGVSPTKLNDLCFTNVYADSFVIRGDEVRQIAPGQTGKIADYNYKLPDDFTGCVIAWNSNNLDSKVGGNYNYLYRLFRKSNLKPFERDISTEIYQAGSTPCNGVEGFNCYFPLQSYGFQPTNGVGYQPYRVVVLSFELLHAPATVCGPKKSTNLVKNKCVNFNFNGLTGTGVLTESNKKFLPFQQFGRDIADTTDAVRDPQTLEILDITPCSFGGVSVITPGTNTSNQVAVLYQDVNCTEVPVAIHADQLTPTWRVYSTGSNVFQTRAGCLIGAEHVNNSYECDIPIGAGICASYQTQTNSPRRARSVASQSIIAYTMSLGAENSVAYSNNSIAIPTNFTISVTTEILPVSMTKTSVDCTMYICGDSTECSNLLLQYGSFCTQLNRALTGIAVEQDKNTQEVFAQVKQIYKTPPIKDFGGFNFSQILPDPSKPSKRSFIEDLLFNKVTLADAGFIKQYGDCLGDIAARDLICAQKFNGLTVLPPLLTDEMIAQYTSALLAGTITSGWTFGAGAALQIPFAMQMAYRFNGIGVTQNVLYENQKLIANQFNSAIGKIQDSLSSTASALGKLQDVVNQNAQALNTLVKQLSSNFGAISSVLNDILSRLDKVEAEVQIDRLITGRLQSLQTYVTQQLIRAAEIRASANLAATKMSECVLGQSKRVDFCGKGYHLMSFPQSAPHGVVFLHVTYVPAQEKNFTTAPAICHDGKAHFPREGVFVSNGTHWFVTQRNFYEPQIITTDNTFVSGNCDVVIGIVNNTVYDPLQPELDSFKEELDKYFKNHTSPDVDLGDISGINASVVNIQKEIDRLNEVAKNLNESLIDLQELGKYEQYIKWPWYIWLGFIAGLIAIVMVTIMLCCMTSCCSCLKGCCSCGSCCKFDEDDSEPVLKGVKLHYT

SEQ ID NO: 820 - protein, 805 aa, Homo sapiens [sequence omitted]

SEQ ID NO: 821 - protein, 269 aa, Homo sapiens
MAAALFVLLGFALLGTHGASGAAGTVFTTVEDLGSKILLTCSLNDSATEVTGHRWLKGGVVLKEDALPGQKTEFKVDSDDQWGEYSCVFLPEPMGTANIQLHGPPRVKAVKSSEHINEGETAMLVCKSESVPPVTDWAWYKITDSEDKALMNGSESRFFVSSSQGRSELHIENLNMEADPGQYRCNGTSSKGSDQAIITLRVRSHLAALWPFLGIVAEVLVLVTIIFIYEKRRKPEDVLDDDDAGSAPLKSSGQHQNDKGKNVRQRNSS

SEQ ID NO: 822 - protein, 112 aa, Artificial Sequence
  VH-78
QVQLKQSGPELVKPGDSVKISCKAAGYTFSDYYINWVKQRPGQGLEWIGWIYPVSVNTKYNEKFKGKATLTVDTSSSTAYMQLSSLTSEDSGVYFCAYLDYWGQGTLVTVSA

SEQ ID NO: 823 - protein, 112 aa, Artificial Sequence
  VL-75
DVVMTQTPLTLSVTIGQPASISCKSSQSLFHSDGKTYLNWLLQRPGQSPKRLIYLVSKLDSGVPDRFTGSGSGTDFTLKISRVEAEDLGVYYCWQGTHFPLTFGAGTKLEMK

SEQ ID NO: 824 - protein, 112 aa, Artificial Sequence
  VL-76
DVVMTQTPLTLSVTIGQPASISCKSSQSLLHSDGKTYLNWLLQRPGQPPKRLMYLVSTLDSGVPDRFTGSGSGTDFTLKISRVEAEDLGVYYCWQGTHFPLTFGAGTKPELK

SEQ ID NO: 825 - protein, 112 aa, Artificial Sequence
  VL-77
DIVMTQAAFSNPVTLGTSASISCRSSKSLLHSDGITYFYWYLQRPGQSPQLLIYRMSNLASGVPDRFSGSGSGTDFTLRISRVEAEDVGVYYCAQMLEFPLTFGAGTKLERA

SEQ ID NO: 826 - protein, 8 aa, Artificial Sequence
  VH_CDR2_42
IYPGSQDT

SEQ ID NO: 827 - protein, 13 aa, Artificial Sequence
  VH_CDR3_59
ANYFGSSGWFFDV

SEQ ID NO: 828 - protein, 120 aa, Artificial Sequence
  VH-79
QVQLQQSGPELVKPGASVKISCKASGYTFTDYYINWVKQRPGQGLEWIGWIYPGSQDTKYNEKFKGKATLTVDTSSSTAYMQLGSLTSEDSAVYFCANYFGSSGWFFDVWGTGTTVTVSS

SEQ ID NO: 829 - protein, 446 aa, Artificial Sequence
  2D10-VH0-VL0 heavy chain peptide sequence
QVQLQQSGPELVKPGASVKISCKASGYTFTDYYINWVKQRPGQGLEWIGWIYPGSQDTKYNEKFKGKATLTVDTSSSTAYMQLGSLTSEDSAVYFCANYFGSSGWFFDVWGTGTTVTVSSASTKGPSVFPLAPCSRSTSESTAALGCLVKDYFPEPVTVSWNSGALTSGVHTFPAVLQSSGLYSLSSVVTVPSSSLGTKTYTCNVDHKPSNTKVDKRVESKYGPPCPPCPAPEFLGGPSVFLFPPKPKDTLMISRTPEVTCVVVDVSQEDPEVQFNWYVDGVEVHNAKTKPREEQFNSTYRVVSVLTVLHQDWLNGKEYKCKVSNKGLPSSIEKTISKAKGQPREPQVYTLPPSQEEMTKNQVSLTCLVKGFYPSDIAVEWESNGQPENNYKTTPPVLDSDGSFFLYSRLTVDKSRWQEGNVFSCSVMHEALHNHYTQKSLSLSLG

SEQ ID NO: 830 - protein, 219 aa, Artificial Sequence
  2D10-VH0-VL0 light chain peptide sequence
DIVMTQAAFSNPVTLGTSASISCRSSKSLLHSDGITYLYWYLQRPGQSPQLLIYRMSNLASGVPDRFSGSGSGTDFTLRISRVEAEDVGVYYCAQMIEFPLTFGAGTILELKRTVAAPSVFIFPPSDEQLKSGTASVVCLLNNFYPREAKVQWKVDNALQSGNSQESVTEQDSKDSTYSLSSTLTLSKADYEKHKVYACEVTHQGLSSPVTKSFNRGEC

SEQ ID NO: 831 - protein, 125 aa, Artificial Sequence
  hIgG1, Ch2 constant heavy chain domain 2. Fc region
EPKSCDKTHTCPPCPAPELLGGPSVFLFPPKPKDTLMISRTPEVTCVVVDVSHEDPEVKFNWYVDGVEVHNAKTKPREEQYNSTYRVVSVLTVLHQDWLNGKEYKCKVSNKALPAPIEKTISKAK

SEQ ID NO: 832 - protein, 326 aa, Artificial Sequence
  hIgG4 Fc region (S228P)
ASTKGPSVFPLAPCSRSTSESTAALGCLVKDYFPEPVTVSWNSGALTSGVHTFPAVLQSSGLYSLSSVVTVPSSSLGTKTYTCNVDHKPSNTKVDKRVESKYGPPCPPCPAPEFLGGPSVFLFPPKPKDTLMISRTPEVTCVVVDVSQEDPEVQFNWYVDGVEVHNAKTKPREEQFNSTYRVVSVLTVLHQDWLNGKEYKCKVSNKGLPSSIEKTISKAKGQPREPQVYTLPPSQEEMTKNQVSLTCLVKGFYPSDIAVEWESNGQPENNYKTTPPVLDSDGSFFLYSRLTVDKSRWQEGNVFSCSVMHEALHNHYTQKSLSLSLG

SEQ ID NO: 833 - protein, 107 aa, Artificial Sequence [sequence omitted]

SEQ ID NO: 834 - DNA, 360 bp, Artificial Sequence
  2D10.2B2 VH DNA sequence
caggtccagctgcagcagtctggacctgagctggtgaagcctggggcttcagtgaagatatcctgcaaggcttctggctacaccttcactgactactatataaactgggtgaagcagaggcctggacagggacttgagtggattggatggatttatcctggaagcaatgataccaagtacaatgagaagttcaagggcaaggccacattgactgtagacacatcctccagcacggcctacatgcagctcggcagcctgacctctgaggactctgcggtctatttctgtgcgaattacttcggttgtagcgggtggttcttcgatgtctggggcacagggaccacagtcaccgtctcctca

SEQ ID NO: 835 - DNA, 336 bp, Artificial Sequence
  2D10.2B2 VL DNA sequence
gatattgtgatgacgcaggctgcattctccaatccagtcactcttggaacgtcagcttccatctcctgcaggtctagtaagagtctcctacatagtgatggcatcacttatttgtattggtatctgcagaggccaggccagtctcctcagctcctgatatatcggatgtccaaccttgcctcaggagtcccagacaggttcagtggcagtgggtcaggaactgatttcacactgagaatcagcagagtggaggctgaggatgtgggtgtttattactgtgctcaaatgatagaattcccgctcacgttcggtgctgggaccatcctggagctgaaa

SEQ ID NO: 836 - DNA, 1356 bp, Artificial Sequence
  2D10.2B2 heavy chain DNA sequence
caggtccagctgcagcagtctggacctgagctggtgaagcctggggcttcagtgaagatatcctgcaaggcttctggctacaccttcactgactactatataaactgggtgaagcagaggcctggacagggacttgagtggattggatggatttatcctggaagcaatgataccaagtacaatgagaagttcaagggcaaggccacattgactgtagacacatcctccagcacggcctacatgcagctcggcagcctgacctctgaggactctgcggtctatttctgtgcgaattacttcggttgtagcgggtggttcttcgatgtctggggcacagggaccacagtcaccgtctcctcagctaagactactcctcccagtgtctaccccctggcccccgtgtgcggcgacacaacaggctcctccgtgacactgggctgcctggtgaaaggctacttccccgagcccgtgacactgacatggaactccggctccctgtcctccggcgtgcacacattccccgccgtgctgcagtccgacctgtacacactgtcctcctccgtgacagtgacatcctccacatggccctcccagtccatcacatgcaacgtggcccaccccgcctcctccacaaaagtggacaaaaaaatcgagcccaggggccccacaatcaaaccctgccccccctgcaaatgccccgcccccaacgccgccggcggcccctccgtgttcatcttcccccccaaaatcaaagacgtgctgatgatctccctgtcccccatcgtgacatgcgtggtggtggacgtgtccgaggacgaccccgacgtgcagatctcctggttcgtgaacaacgtggaggtgcacacagcccagacacagacacacagggaggactacaactccacactgagggtggtgtccgccctgcccatccagcaccaggactggatgtccggcaaagagttcaaatgcaaagtgaacaacaaagacctgggcgcccccatcgagaggacaatctccaaacccaaaggctccgtgagggccccccaggtgtacgtgctgcccccccccgaggaggagatgacaaaaaaacaggtgacactgacatgcatggtgacagacttcatgcccgaggacatctacgtggagtggacaaacaacggcaaaacagagctgaactacaaaaacacagagcccgtgctggactccgacggctcctacttcatgtactccaaactgagggtggagaaaaaaaactgggtggagaggaactcctactcctgctccgtggtgcacgagggcctgcacaaccaccacacaacaaaatccttctccaggacacccggcaaatagtaa

SEQ ID NO: 837 - DNA, 663 bp, Artificial Sequence
  2D10.2B2 light chain DNA sequence
gatattgtgatgacgcaggctgcattctccaatccagtcactcttggaacgtcagcttccatctcctgcaggtctagtaagagtctcctacatagtgatggcatcacttatttgtattggtatctgcagaggccaggccagtctcctcagctcctgatatatcggatgtccaaccttgcctcaggagtcccagacaggttcagtggcagtgggtcaggaactgatttcacactgagaatcagcagagtggaggctgaggatgtgggtgtttattactgtgctcaaatgatagaattcccgctcacgttcggtgctgggaccatcctggagctgaaacgtgctgatgttgcccctactgtgtccatcttccccccctcctccgagcagctgacatccggcggcgcctccgtggtgtgcttcctgaacaacttctaccccaaagacatcaacgtgaaatggaaaatcgacggctccgagaggcagaacggcgtgctgaactcctggacagaccaggactccaaagactccacatactccatgtcctccacactgacactgacaaaagacgagtacgagaggcacaactcctacacatgcgaggccacacacaaaacatccacatcccccatcgtgaaatccttcaacaggaacgagtgctaataa

SEQ ID NO: 838 - protein, 330 aa, Artificial Sequence
  mIgG2A(LALAPG) Fc region
AKTTPPSVYPLAPVCGDTTGSSVTLGCLVKGYFPEPVTLTWNSGSLSSGVHTFPAVLQSDLYTLSSSVTVTSSTWPSQSITCNVAHPASSTKVDKKIEPRGPTIKPCPPCKCPAPNAAGGPSVFIFPPKIKDVLMISLSPIVTCVVVDVSEDDPDVQISWFVNNVEVHTAQTQTHREDYNSTLRVVSALPIQHQDWMSGKEFKCKVNNKDLGAPIERTISKPKGSVRAPQVYVLPPPEEEMTKKQVTLTCMVTDFMPEDIYVEWTNNGKTELNYKNTEPVLDSDGSYFMYSKLRVEKKNWVERNSYSCSVVHEGLHNHHTTKSFSRTPGK

SEQ ID NO: 839 - protein, 330 aa, Artificial Sequence
  mIgG2A(LALA) Fc region
AKTTPPSVYPLAPVCGDTTGSSVTLGCLVKGYFPEPVTLTWNSGSLSSGVHTFPAVLQSDLYTLSSSVTVTSSTWPSQSITCNVAHPASSTKVDKKIEPRGPTIKPCPPCKCPAPNAAGGPSVFIFPPKIKDVLMISLSPIVTCVVVDVSEDDPDVQISWFVNNVEVHTAQTQTHREDYNSTLRVVSALPIQHQDWMSGKEFKCKVNNKDLPAPIERTISKPKGSVRAPQVYVLPPPEEEMTKKQVTLTCMVTDFMPEDIYVEWTNNGKTELNYKNTEPVLDSDGSYFMYSKLRVEKKNWVERNSYSCSVVHEGLHNHHTTKSFSRTPGK
